United States Patent Application Publication US 2024/0132992 A1 - sequence listing, part 3

SEQ ID NO: 2 - DNA, 6856497 bp, Pseudomonas sp. BR8764 (residues 3,428,251-5,142,375 of 6,856,497)
ggcgctgcaccggcatggcggccagccctcgcacgcccgccccgcgcagcaggcgaaacaacagggtttcagcttgatcgtcgcgatgctggccagtgagcagcaacgcccctgccccggttacttcggcaaatgcttgatagcgcgcatcacgggcggcacgctcaaggctggcaccgggctggacgtgcacatgcatcacgcgcaagggcacgtccaggctgtcgcataccgactggcaatgctgcggccacgcatcggcagcagcttgcaggccatggtgaacatggacagcgctgagcggcgggagggtttcagtgtttgccagatcggcgagaaggtgcaacaggacggtggaatcaagcccgccggagaatgcaatgtgccaagccggggcattgcgccagggggccagggtttgcaggagtctggcggacagagccggcttcataacaaagtaccgccatcaatctgaaatgcgataacccagcatacacaaaacaaatgtgggagcgtggcttgcccgcgatgcaggcgcctcggtcgaacagttgcaccgaggtggcgctatcgcaggcaagccagctcccacacaagccggctcccaaattgagaattgtgttgtgcttagaggccgtagctcatcaaacgctcataacgacgcgtcagcagcgcctcgttatccagcttcttgagcattgccagctgcgagcccagttcagcacggatggtcgcagcagcggcagccgggtcacggtgagcgccgcccaggggctcggcgatcactttgtccacgatgcccaggcccttgaggcgatcagcagtgatgcccatggcttcagcagcgtccggcgccttttctgcggttttccacaggatggaggcacacccttccggcgaaatcaccgcgtaggtcgaatattgcagcatgttcagttggtcgcacacgccaatggccaatgcaccgccggaaccaccttcaccaatcacggtggcgatgatcggggttttcaggcgggacatgacgcgcaggttccaggcgatcgcttcactctggttgcgctcttcggcgtcgatgccagggtatgcgcccggcgtgtcgatgaaggtcaggatcggcatcttgaagcgctcggccatttccatcaggcggcaagccttgcggtagccttcagggcgcggcatgccgaagttgcggcggaccttctcgcggacttcacggcctttctggtgaccgatcaccatcaccggctggtcgtccaggcgagcgataccgcccacgatggccgcgtcgtcagagaagtggcgatcgccatgcaactcgtcgaactcggtgaagatgtgctgaatgtagtccagggtgtacggacgacgcggatggcgggccagacgcgcgatctgccagctggtcagcttgccgaagatgtcttcggtgagcgtgctgctcttgtcttgcaggcgagcgatctcatcgccgatattcagcgaattgtcattgccgaccaggcgcagttcttcaatcttggcttgcaggtcagcgatcggctgttcgaaatcaagaaaattcgggttcataagcgtccgtcttgggtcgacggccagggcgtgcctggccagccggttgtctattcgcgccctaccttaagggagaggcgcgtttaggtcgagattaaatgttcagccgaggtcagacatatctgaccatcaacggtattggaggaagacgttgtctcgcccgaactggtcacgcaaagcttgaatcaagccatcggcgggatcaattcgccaagtctcgccaaactgcaacatggccttggcgtcattgccggtgtactccatggtcaccgggcacgcgccacggtggcgcttgagcaggtcgcccaaccagcgtagctgatcgcccttgagggcatcggtcttgaccttcaaacgcaggctttccgccagattggtgcgcgcatcttccatgctcatcacccgcttgatccgcaggcgcaggccaccggagaagtcatcgttgctgacctccccctccaccacaaccatggcgtcagtctgcagaagcgactgagcggagtggaatgcatcggcaaacagcgacgcctcgatgcggcccgagcggtcatcgagggtgataaagcccatcttgtcgcccttcttgttcttcatcacgcgcagggcgatgatcatgccggcgacggtctgggtgtcgcgcgccggcttcaggtcgatgatacgctggcgggcgaaacggcggatttcgccctcatattcgtcaatcgggtggccggtgaggtacaggcccagggtgtctttttcacccttgaggcgttccttgagggtcagctccttggccttgcggtggttaccgtacacatccgcatcctcctcgacgaacaacccgccaaacaggtcggcgtggccgctgtcatgggtacgtgcagtctgttcggcggccttgatcgcctcttccatggcggtcagcagcaccgcgcggttgcggtcgatattcgcctgataagccttcggctcgtcatggaagtacggaccaagacggtcgagtgcaccactgcggatcaaaccatcgagggtacgcttgttgatgcgcttgaggtcaacccgtgcacagaagtcgaacaagtccgtgaacggcccgttctgtcgcgcttcggtgatcgcttccaccgggccttcacccacgcctttgatcgcgcccagaccataaatgatgcggccttcgtcgttcaccgtgaacttgaactcagaggcgttcacgtccggcgcgtcgaggcgcagcttcatggtgcgcacttcctcgatcaaggtcacgaccttgtcggtgttgtgcatgtccgccgagagtaccgcagccatgaacggcgccgggtagtgggctttcagccaggcagtctggtaggacaccaggccgtaggcggcggagtgggatttgttgaagccataaccggcgaatttttccaccaggtcgaaaatgttaccggccaggtcggcgtcgatattgttgctggcgcaaccttcaatgaaaccgccacgctgcttggccatttcctcgggctttttcttacccatggcccgacgcagcatgtctgcaccaccgagggtgtaaccggccatgacctgagcgatctgcatcacctgttcctgatacaggatgatgccgtaggtcggcgccagtaccggcttgaggccttcgtactggtagtcggagtgcgggtaggccagttcggcgcggccgtgcttacggttgataaagtcatcaaccatgcccgattgcagcgggcccggacggaacagggccaccagtgcgatcaagtcttccaggcagtcgggcttgagctttttgatcagctctttcatgccgcgcgactcaagctggaacaccgccgtggtttcggccttttgcagcaattggtaggtcggtttgtcatccagcgggataaacgcgatatccagcggcgcctcatcgaccttggcgcgatcgcggttgatggtcttgagcgcccagtcgatgatcgtcagggttcgcaggccgaggaagtcgaacttcaccaggccggcagcctccacgtcgtccttgtcgaactgggttaccaggccatcgccctcttcgtcgcaatagatcggcgaaaagtcggtgagtttggttggcgcaataaccacaccaccggcgtgcttgccgacgttacgcaccacgccctcaagtttgcgcgccatgtcccagatttcggcggcttcttcatcgatcttgatgaaatcgcgcaggatttcctcctgctcgtaggccttttccagggtcatgccgacttcgaacgggatcatcttcgacaggcgatccgccaggccgtaggacttgccctgcacccgggccacgtcgcggattacagccttcgcggccatggaaccgaaggtaatgatctggcttaccgcgttgcgcccgtatttctcggccacgtactcgatgacgcggtcacggccgtccatgcagaagtcaacgtcgaagtcgggcatggagacccgttccgggttcaggaaccgttcgaacagcaggtcatattccagcgggtcaaggtcagtgatcttctgcacataggccaccagcgagccggcacctgacccccggcccgggccaacaggcacgccgttgttcttggcccactggataaagtccatcacgatcagaaagtaaccggggaaccccatctggatgatgatatccagctcgaaattcagccgatcgacatacacctgacgcctggcatcgtagtcttcggtcgtatccctgggcagcagaacggtcaggcgttcttccaggccatcgaacgacactttgcgaaaatactcgtcgatggtcatgccatcgggaatcgggaagttgggcaggaagtgcttgcccagcttcacttcaatattgcagcgtttggcaatttctacggagttttccagggcctcgggcaggtcgctgaacaactcggccatctcgtcggcgcttttgaggtattgctcttcgctgtagttcttcgaacggcgcgggtcatccagcgcccggccttcgccgatgcacacgcgggtttcgtgggcttcgaaatcttctttcttgatgaaacgcacatcgttggtcgccaccaacggcgcacccagcttgtcggccagggccacggcggcgtgcagatgctcttcatcgttggggcggttggtgcgctggacctcaaggtagaaacggtcggggaagacctgcatccactcacgggccaacacttcggcttcctgggggttgccgcccagcaatgcgataccgatttcgccctctttcgccgccgagagcatgatcacaccctcgctcgcctcggccacccactcacgctcgatgatgatcgagccattgcgctggccgtcgataaatccgcgcgagatcaactcggtaaggttgcgataacccacgccgttcatcgccagcaggctgatgcggctcagggggttatccgggtctttgttggacagccacaggtcgacgccgcagatcggcttgatgccggcgcccatggtgttcttgtagaacttgaccagggaacacatgttgttctgatcggtcaccgcgactgcaggcatgttcatgcccaccagggttttgaccagcggtttgatccgtaccaggccgtcgaccagggagtattcagtgtgcaggcgcaggtgaacgaatgaagccggcatagtgatcctgttctaatacgtggagacaacaaggcccggattgtaccgggccttggaaaaaacatcagcctcgcggctaaacctcgctgaggctttcccgcgcctcgtaagccaggcgaaccggggcaaacgagcgacggtggatcggggttggccccagacgcgccagggcttccagatgaacgggcgtcggataacccttgtggccaccaatgccgtagccggggtagatcaattcgaacgctgccatttcacggtcgcggctgactttggccaggatcgaggccgcggcgatggctggaaccttgctatcgcccttgaccaccgcctcggacggcatagccagtttcgggcaacggttgccgtcgatcatcgccattttcggcgtgatgtgcaggccctctactgcgcgctgcatggccagcatggtcgcgtggaggatgttcaattcgtcgatttcttcgacttcggcccgagcaatgtgccagctcagggctttttcgcagatttcgtcgtacagtttttcacgacgtgcttcggtgagttttttcgaatcgttgaggccgaggatcggacgattcggatcaagaatcaccgctgccgtgaccactgcaccacacagcgggccacgcccgacctcatcgacaccggccaccagttcgtgagcttcagccaccaggctgaagtccaggcccatttgcgtcgtcatagggtttcctgtttgtggccgatcaacgtcagcacagcatccgcagctgtgttcgacgcatcacggcgcagggtgcgatggatgtcgtcaaaaccacgggtctgctcttcgccgccatcgatcaggggaagaagggtttgcgccagcgcttcgggcgtcgcatcgtcctgcaacaactccggcaccagcagacgctgggccagcaagttgggcaaggaaatgtaggggcttttgaccatgcgcttgagaatccagaaggtcagcggcgccaggcggtaggccacgaccatcgggcgcttgtacaacaaggcttccagggtcgcggtgcccgacgcgatcagcaccgcatcgcaggcggccaaagccagatgcgattggccgtcgagcaaggtcaacggcagctcacgcccttccagcagtgtttcaatttgtgcgcgacgttgcgggctggcacacggcagcacaaaacgcacccccggcttcaaggcttgcaggcgcttggcagcatcaaagaacagcgcgccgaggcgacccacctcaccgcctcggctgcccggcatcaatgcaaccagcgggccgtcgggcaagcccaactcggcgcgcgctgctgcacgatctgcctgcagggggatggtgtcagccagggtgtggccgacaaaccgcaccggcacgcccttctcttcatagaaacgggcctcgaaaggcaacagcgtcagcatcaagtcgcagccttcgcggatcttcagcacgcgcttctgccgccacgcccacacggaggggctgacgtagtgaacggtcttgatcccggcctgacgcaacttgagttcgatattgagggtgaaatccggtgcgtcgatgccgatgaagacgtcaggcttttcttcgatcagcgtctgaataagcagcttgcggcgagccagcaactcacgcagtcggcccaacacctccaccagccccatgaccgacaagcgctccatgggaaagtatgaagtgagaccttcggcctgcatcagcgggccacccacccccatgaactccaccgcaggatgctgggccttgagggcccgcatcagccccgcgcccagaatatcgccggaagcttcaccggcgaccaacgcaatacgcagattggccatgatcagcgcgtgatgccgcgagtcgacgcctggatcgagtcacggaacaccgcgacttccgggaacaacgctgccggctcggtcagttcagtcagggcctgctcaaccgtcagcccctggcggtaaaccaccttgtaggctcggcgcagggcgtggatcgcgtcttcgctgaaaccccggcggcgcatgccttcgaagttcatgctgcgcgcctcggccgggttaccgaacacggtgacgaatgccggaacatccttgccgatcgccgtacccatgccggagaagctgtgggcgccgatatggcaatactgatgcaccagggtgaaaccggacagaatcgcccagtcatcaacatgaacatgtcccgccaacgcggtgttgttgaccaggatgcaatggttgccgatcacgctgtcatgaccgatgtgcgcataggccatgaccaggttgtgatcgcccaaggtggtttcagcgcggtcctgcacggtgccacggtgaatggtcacgccttcacggatgatgttgtgatcaccaatgaccaggcgcgtctcttcacccttgtacttcatgtccggagtgtcttcacccaccgacgaaaactggtagatgcgattgtgtttgccaatgcgggtcggacccttgaggatcacgtgcggcccgatgacagtcccctcgccgatttccacacctgcgccgatgatcgaccaagggccgacctcaacgtcggcggccagaacggccgacggatcgatgattgcgcgagggtcaatcaaactcatagtttgcgttccgcgcagatgatctcggcggagcacactggcttgccgtccaccgaggcctggcactcgaacttccagatctggcgcttgcagctgatgaacttggcttccaggatcaactggtcacccggggtaaccgggttgcgaaagcgcagcttgtcggagcccacgaaataatacagcgtgccgtcggcaggcttgaggtcgagcattttgaaaccaaggataccggcagcctgggccattgcttcaataatcaacacgcccggcatgattggatgcgcagggaagtgaccattgaagaacggttcgttgatgctgacattcttgtaggcacgaatgcgcttttcctcaacgttgaggtccaccacgcgatccaccagcaggaacgggtaacggtgaggcagatattcgcgaatctcgttgatgtccatcatttcggggggaagcctgtaataaagattgggggcgggcggactaaaagcccaccccgctagcaaatcaaggaggcagtctagcggctgtacacacttgatatggaaatggtatcagccttcagatgaagcattaccgtcaggggtcacgtctgcaacgcgcttttccaactgcttgagacgccgagccatgtcgtcgagctgcctcaaacgtgccgcacttttgcgccattcagccgcaggctgcatggcagtaccggaagaataggcacctggctcggtaatcgagtgggtcaccatggtcatcccggtaatgaagacgttgtcgcaaacatcgatatgtcccaccagcccaacaccacctgcaagcatgcagtgcttgccgattttggtactgccggaaatacccacgcacgccgccatggccgtgtgatcgccaatttgtacgttgtgggcaatctgaatctggttgtcgagcttcacgccattaccgatcacggtgtcggccaaggcgccgcgatccacggcggtattgacgccgatttccacgtcatcgccgatcaacacgccgccgacctgggcaatcttgtgccaaatgcctttggagttggcaaagccaaagccttcaccaccgatcacggcacccgactgaatcaccacgcgctcaccaatacgcacatcgtggtacagggtaacgcgaggcgccagccaaccatcggcaccgatctcgcaacgcgcaccgataaagcagtgggcacccaccgttacacccgcgccaatgcgcgcaccactttcgatcacggcaaacgcgcctatgctggccgcaggatcaacctgcgcatcatcggcgatcacggccgacggatgaattccgcccgcggccttgggttttggatcgaacaggtgtgacgcccgggcataagccaggtacggatcagccaccaccaatgcatccccggcaaacccttcggcgtcagcagctttgagcaacacagctgcggctttgctgtcgaccaggtatttacggtattggggatttgcgaggaagctcaactgagctgggccagcctcctgcaaggtggctagcccagtgatttctttctccttggagccactcaaggtggcccccaggaactcggccaactcgccgagcttgatagtcgcggtcatggcttacttcagctggttcatgcgctcgatcacctgacgggtgatgtcgtattgaggcttgacgtcgattacagcgccacgctcgaacaccaggtcaaaggcacctttcttgatgacttcttccacagcgctatccagtttcggcttgagctgcttgagcatttcacggtcggcaacggccttcgcttcgttcagctccttggactggaactggtagtcacgggccttttgcttgaattcaagctccagacgctcgcgctcgccttgttgcatcttgtcaccaccggctaccagacgatcctggatacccttggcgctgctttccagcgttttcagcttggtcagttgcggaccgaattttttctcggcgtccacggcgtatttcttggccgcgtcagactccagcagagccatctgatagttcaggacggcgattttcatttcggcgaaggccggggtggttaccagcacagtggccagcaggaccaattgagtcaacttacgcacgatgtactcctacagaatccgttgtcgttatcttgggtcagacgcttagaacgtctggccgagggagaattggaaaatctgggtttcagcgttatccggtttcttgatcggcatggccagagcaaagctcaatgggcccagcgccgtcacccaggtcacacccacacccaccgagcttgccaggttgctgaggctcacgtcgttgcactgagtgttggacttgacgccgctcgggttgacgatctgctcacacttggagtcgaacacgttacccacgtcccagaagaccgacgtacgcagcgaacgctggtctttaacgaatggcagcgggaacaggatctctgcaccaccctgaatcaacacgttaccaccgaatggcagcggatcgttgtcagagtcaacggtggtgccctggttaccggttactgcctggccacggctcggagtaccacgcgggcccaaggtgctgtccttgaagccacgtaccgagttgaaaccacctgcatagtagttctcgtagaacggcagaccactggtcgaaccataaccgtcgccataacccagctcagtgtgcaggcgcatggtgtagttatcgctcaacggctggaacaactggccacggtagtcgagcttgaagaacgacaggtcgctgcccggcgtggtggcttccagggtcaagctctgggaatggccacgggtcgccaatacgcctttgttcagggtcgactccgaccagccggccgatgccttgaagttcaggaactgatcaccttctttacgcacgaagttgaagatttcgtccacggtgtacacaccggtcttgatcttgtcctgttgcgcagtcaagccgaaggtcagacgcgaagtctcactgatcgggtaacccacgttgacaccggcacccaggctgtcgattgcatagcttgcaacgtctacgtcaaggtctttgtagtcggtggtgcgatagaaggcgttgtagcccaggctcacaccgtcagcagtccagtaggggtcggtataaccgaagttatagcggctctggtattcgcttcgggtcaggccgatggacacacggttaccggtaccgaggaagttgttctgggtgatcgaaccacccaggatcagacctgcactctgtgcgaagccgacgctggcggtgatcgaacccgaggcctgttcttctacggcgtagttcacgtcaacctggtcatccacacccggcacggccggagtctcgacgttgacttccttgaagaagcccagacgctcaaggcgggtcttggactggtcgatcaggtaagtcgacgcccagccaccttccatctggcgcatttcgcgacgcagcacttcgtccgcagacttggtgttgccacggaagttgatgcggtttacataagcacgcttgccgggatcgactacaaaggtgatgtccacagtgtggtcatcatcgtgcggggtcggtacgccgttgacgttggcaaaggtatagccttcgttacccaggcggcgggtaatcagttcggacgtggtggtcatcagcttgcgcgagaacacctgatccttctgtaccagcaagagggacttgacctgatcttcaggcactttcaagtcgccgctgagcttgacgtcacgaacggtgtacttctcgccttcgttgacgttgacggtgatgtagacgtgcttcttgtccggggtgatggacacctgggtcgaagcgatatccatattgatatagccacggtccaggtagtaggaacgcagacgctccaggtcaccggacaatttttcacgggcgtacttgtcatcgttcttgaagaacgacaaccagttggtggtcttgagttcgaacagatcgatcaggtcgtcatcagcgaacttggtgttacccaccacgttgatgtgctgaatcgccgctaccgtgccttcgttgatcttgaccttgaggccaacacggttacgaggctgcgggatcacttcggtttcaacagtcgcagagtagcgaccctgggcaacgtactgacgttgaagttcgttacgcacaccctcaagggtggcgcgctggaaaatctcgccctcggcgaggccggattgcttgaggcccttcatcaggtcttcagtggagatcgccttgttgccttcgatctcgatactggcgacggaaggtcgctcgacgacggtgatgaccaggacgttaccttcgcgacccagttggatatcttgaaagaacccggttttgaacagcgcacgagtggattccaccaggcgacggtcatcagcctgttccccgacgttcaacggcaaggcaccaaacacgctaccggcggaaacccgctggaggccgttgacgcgaatatcggagatagtgaaggactcggcgtgaacttcggcgatcatcaatacggtgagaaccgcagttagcagcagacgtttcatgaagtcctttcttattccaactggcaataaacaaactgccgcaaaatgcggcagattcgcaattcagcgaagcgttacagacgtcccagatcgttgaccagagctaacaacatcactccgaccaccaaactgataccaatctgtatcccccaaccctgcacccgatccgacaaggggcgaccacgcacccactcgaccagataaaacaacagatgccccccatccaacactggaataggcagcaaattcagaaccccaaggctaatactcagataagccaggaaattcaggaaatccgcgacacccgactgggcagaagcgcccgccactttagcaatggttatcggtccactcaagttttttaccgagagctcaccgaacaacattttcttgagcgattcgagggtcagcacgctcatggtccaagtgcgtttcgcaccctcgccaatggcagccaaaggcccatagctgacctcgcgcatcatcgatggcggccactcgacacccttgaccccggcaccgaggtagcccccggccgccttggcttccccgcggaccgacagggtcacagggacgtcgatttgagcaccatcgcgctcaactttcagcacaattttggtatcagggcgtacacgcaccaagtcaaccacttgctgccagtcacccagcgcctgaccatccagggtcaggaggcgatcaccggttttcaggccggcagcctgggccggacctttcgggtccagctcggcgagcactggcggcaaggccgggcgccacgggcgaatgcccaaagacttgatcggatcaggttcatcggaccccttgagccaatgatccagcgccagctcacgcggcgtttcggccgtggagccctgctcgcgcaccacgaccttgacggtgccgctttcacccaggcggctcaccagacgaagattgacatcgcgccagcccaatgtgggctcgccatcaatggaaacaatttcctgcccggcaaccaggcccgccttggccgcgatactgtcagcctcgacagcgccgatgaccggacgcatctcctggctacccagcatggccaggacccaaaaaaacaccatcgccaacaggaaattggcgatcgggcccgccgcaacaatggcgatacgctgacgaacggtcttgcgattgaacgactgatccaactggtcagcaggcacttcgccttcacgctcatcgagcattttgacgtagccacccagaggaatggctgcgattacaaattcagtgccacgccggtcatgccagcgcagcaacggcatgccgaaaccgacggaaaagcgcaataccttgacgccgcaacgacgcgccacccagaagtggccgaattcgtggaaggtaaccagcacacccagagcaaccagggtgccgacaatcatgtagagcgcactcatctaatttctccgcattccaatccagtgcctgaaggcgcacacctgcccacagactaacgcgcgttgcggttcaaccattgttcggccagggcacgggctttggcatccgcctcgaacacagccgccaattcctctacagccactacaggctcgaggctcagaacgtcctcgatgatactcgggatctgcggaaagcggatgcgccgttcgagaaacgccgccacagccacttcattagccgcattgagcatcgccggcgcacttttgcccacttccgccgcttgccgcgccaggcgcaggcatggaaagcgctgttcgtcgggcgcttcgaaatccaggcgggcaatggcaaacaggtccaacggggcaacaccggagtcgatccgctccggccacgccagggcattggcaatcggcgtgcgcatgtcagggttacccaactgagccagcaccgagccatccacatagtcgaccagggaatgaatcacactttgcggatgaatgaccacttcaacctggtccgggcgcgcatcgaacaaccagcacgcctcaatcagctccagacctttgttcatcatgctggcagagtccacggagattttgcgccccatggaccagttcgggtgcgcacacgcctggtccggagagacgtgctccagctccgccaacggagtttgccggaatgggccgccggaagccgtcagaagaatccgacgtaccccgacctgattcaagccgcgagcaaaatcgcccggcatacactggaagatcgcgttgtgctcactatccaaaggcagcagaacggctccgcttttgcgcacagcctgcataaacagagtgccggacatcaccagcgcttctttgttggccaacagaatcttcttgcccgcgttgacggctgccagcgtcgggcgcaagccagccgcaccgacgatggccgccacgacggtatcgacctcggcgtcggccgacaccgcacacaacccctcctcacccaccaacacctgcgtggccaggccggcagcgcgcaattcttcctgcagcccgcgcgccaacgcttcttgcggcacaacagcgaagcgaggcgtgtggcgcacacagagggccagcaattcggtcaggcgagagaacccggtcaaggcaaaaacctgataacgctcagggtggcgcgcgatcacgtccagtgtgctcaggcctaccgagccggtcgcacccagcacggtcacctgctgcaggccactcacgaagcggtcatccacaacagcacggcaaaaatcgggatcgctgcggtaaggctgtcgatacgatccagcacgccgccatgacccggcagcagattactgctgtctttgataccggcctgacgcttgaacatgctttcggtgaggtcacccacaacggagatgaacacaacaacagctgtccccaacaacgccaggaagatttcctttgccgaccaatcgcgcaccaacccgaccacgagtgtgatcaacagtgtcaacgcaaggccaccgtaaacgccttcccagctcttgccagggctgaccgccggcgccagcttgcgcttgccgaaagcccggccggagaagtacgcaccaatatcagcgccccagaccagcaccatcactgccaggatcaaccagttgcccatcggcgcatttttgatttccaccaacccttgccaggccggtagcagcaccaacaaaccgatcaccagcttgctggcaacactcgaccactggccactggttcgtggataggtcagcaccaggaacgtcgccagcgcccaccacagcaccgccgcccccaatacccacggcacgacaatgctggaaaggtaatgcatgaggaacagcaaaaccgccacgaccgcagcgtacaccacgcgcggcagctggttattgaagcccgccaggcgcgcccactcccaggcccccagggtcacgaccaggccgataaacaaggcaaagccggaaccgtcgagcaggaaaaaaccgcacaaggcaatcggcagcaggatcagggccgtgatgattcgttgtttgagcatttaaacccgggctccagcttcgatctgctcgctcgttttaccgaagcgacgctgacgggaagcgaaatcggccagcgcattgcgcatggcatcgtgtttgaagtccggccagaacaggtcggagaaatacagctcggtgtaggccaactgccacagcaggaaattgctgatgcgatgctcaccaccggtacggatacacaagtccggtaacggcaggtcaccggttaccaggcacgtctgcagcagttcgggggtgatgtcgtccggccgcaaatggccagcctgcacttcgcgggcaagccgctgggcggcctgcgcgatatcccactggccaccgtagttggccgcaatctgcagcacaaaacgattggcacccgcggtgatcgcctcggcttcgcgcatggcggcctgaagctcgggatggaaccgcgagcgatcgccaatgatgcgcaagctgatgttgttgtcgttgagacgcttggcctcacgacgcagggccttgaagaacaggtccatcaaggcactgacttcttcggccgggcgctgccagttttcactggagaaggcaaacagagtcaacacctcgaccttggcttcggcgcacacctcaatgacggcgcgcaccgcatcgacacccgctttatgcccggcaacacccggcataaagcgtttcttcgcccagcgattattcccatccatgatgatcgcgacatggcgcggcaccacagagggtacagtctgcttggtcttttccatgaaggcgtcctgaccccttatacggccatcaggtccttttctttttcttccgtggccttggtgatctgggcctcggcgtctttggtcagcttgtcgatatcggcggtggcacgacgttcttcgtcttcgctgatttccttgtccttgaccagtttcttcaggtcacccaacgcatcacggcggatgttgcgcacagccacacgcgcgtcttcagctgcgctacgcgcctgcttggtgaagcccttgcgggtttcttcagtcagggcaggcatggagatcagcagcaactcacccaggttggtcgggttgaggttcaggccggcactctggatggccttgtcgacagcacccagcatgttgcgctcaaacgcgacgacttgcagcgtgcgcgagtctttaacggtaatgttggcgacgctgctgatcggtgtatcagagccatagtaaggcaccatcacgctgcccaggatgcttgggtgcgccttgccggtacgaatctggccgaatgcgtggctcagagactccagggatttttgcatacgcgcttgggcgtctttcttgatttcgttgatcattgttggccttcctcgatcagagtcccttccgcgccgccgtgtacgatattcagcagggcgccgggcttgttcatgttaaatacgcgcagcggcatcttgtggtcgcggcacaggcaaatagccgtcaggtccatcacgcccagcttgcgatccagtacttcatcgtaggtcagatgatcgaacttctcggcatgcgggtctttgaacgggtctgcggtatacacaccgtcaaccttggtcgctttcaacacgacgtcagcatcaatctcgatagcgcgcaggcacgccgccgaatcggtggtgaagaacgggttgccggtaccggcggcaaagatcaccacctctttggcgttcaggtggcgcatggctttgcggcgatcatagtgatcggtcacgccaaccatggaaatagccgacatcacgatggccgagatgttggcacgctccagggcgtcgcgcatggccagggcgttcatcacagtggccagcatgcccatgtggtcgccggtgacccgatccatacccgcagcgcttagcgctgcaccacggaacaggttgccgccgccgatcaccaggccgacttgtacgccgataccgaccaattggccgacttccagcgccatgcggtcgagcaccttgggatcgatcccgaactcttccgagcccatcagggcctcgccgctgagcttgagtagaatgcgtttatagcgagcctgataaccactgccctgctgagccattgcgaatctctcctgcggcgtattttttaaaaattcttggcgagccgtttacggcttgcgttcactctagctggacgctatcacagcgccatcggaacacggctttgtaagccagttccaacaggaatccaaataaattcggccttcccatttgaaaagaggctgcgcgcgtgagcgggcagcctctttcgggcgacagtttaaaactgtcttattgcttggcggcagccagctgggcagcaacttcttcagcgaagttgtcgaccggcttctcgataccgtcgcctactttgtagtaggtgaaggaaacgatttcagcaccggctttcttggccagttcgcccaccttgatttcagggttcttgacgaacgcctgctcaaccagggaagcctcagccaggaacttgctgatacggcctttgatcatgttttcaacgatgttttctggcttgccggcgatcttgtcggcgttcaggctcaggaacacagctttttcacgctcgatcgcttcgtcagaaacttccgaaggcagcaggaattccgggttgcttgcagcaacgtgcatagcgatgtctttggccagctcaacgtcgccgcctttcagaacaacggctacaccgatcttgttgccgtgcaggtaaccaccaacaacatcaccttcaacgcgggtcaggcgacggatgttgacgttttcgccaaccttgccgaccagtaccaggcgagcagcttcttgagcttcgatcagaggctcaacggtagtcagcttgtcagcgaatgctttttcaacgctggcagcaacgaatgccttgaagtcatcttgcagggccaggaagtcggtctgcgagttcacttccagcagaacagcggatttaccgtcttctttcagagcgatagcgccttcagcagctacgttgcctgctttcttggcggccttgatggcgccggaagcacgcatgtcgtcgatggctttttcgatgtcgccgccggccttggtcaaggcctttttgcaatccatcatgccttcgccggtacgctcacgcagttctttgaccaacgctgcagtaatctctgccatttcaaaatcctcttggataggttttcaaccattccacccgatcaaacgggcgatcaattcttcccgaatctccgttgtaggccgccgcacgttacagtcgctaggttgcgctgccacaagtgagcgccgacaaacggttttcgaggtggcaaaaagggggccaagccccctttttgcttactgagtcaacgccagggcgttaattactcagcggcagctaccggagcttcttcaacgaactgctcggtaccaccagcaacgtggttgcgaccacggattacagcgtcagccatcgaacccatgtacagctggatagcgcggattgcgtcatcgttgcctgggatgatgtagtcaacgccttccgggctgctgttggtatcgactacgccgataacagggatgcccagcttgttggcttcggtgatcgcgatgcgctcgtgatcaacgtcgataacgaacagtgcgtcaggcagaccgcccatgtccttgataccacccagggaacgatcgagcttttccaggtctcgggagcgcatcagcgcttctttcttggtcagcttggcgaaagtaccgtcttcggcttgcacttcaaggtcacgcagacgcttgatggaagcacggatggttttgaagttggtcagcatgccgcccaaccagcggtgatcgacgtacggcgaaccgcaacgtgctgcttcttcagcaacgatcttgccagcggaacgcttggtgccgacgaacaggatcttgtttttgccctgggccagacgctctacgaaagtcagagcttcgttgaacattggcagggttttttcaaggttgataatgtggatcttgttacgcgcgccgaaaatgtacttacccattttcgggttccagtaacgggtctggtgaccgaagtgcacaccggccttcagcatatcgcgcatgttgacttgggacatgatagttccttaataagtcgggtttggcctccacgtatcccaatgaccaaccagcggcatcaaggcctccggcacccaggtcatcgtgtcgacacgtgtgtggatttaagccttgcggggcatccccggaaagcggcgcattttataccacacgaacggcaaaaacgaaacccgcaatcacatttgccgacgaccgctttcgcgtaaccccttgaatagagccgacatacccctactctatagaaagaagcgatcaccagaggctcatgatttggggccatcgtctggtagaatcgcgttttttgtggcttgtgcgaattctgcaaccttttgtcgcacgcccgtaaactgcattgatttcagcgcgtcgcgctagagagagcctgtatgaccgtaagtttgaaaaccgccgaagacatcgccggcatgcgcattgccggcaaattggctgccgacgtgctggaaatgattgccgaacacgtcaagcccggcgtcaccaccgacaccctgaaccagatctgccacgactatatagtcgacgtgcaaaaggccatccctgcgccgttgaattacaaaggcttccccaagtcgatctgcacctcggtcaaccacgtggtttgccacgggattccgggcgacaagccgttgaaggacggcgataccctgaacatcgacgtcaccgtgatcaaggaccgttatttcggcgacaccagccgcatgttccacgtgggcaccgtgccggtctgggccgagcgtctgtcccaggtgacccaggaatgcatgtacaaggccatcgagatcgtcaaacccggctgccgcctgggcgacatcggtgaagtgatccagaagcacgcggaaaagaacggtttctcggtagtgcgcgaattctgcggccacggtatcggcaccgtgttccacgaagagccacagatcctgcactacggccgcgcgggcaccggtatggagctcaaagcgggcatgaccttcaccatcgagccgatgatcaaccagggcaaggccgacaccaaggtgctgggcgacggctggactgccatcaccaaggaccgcaagctctcggcccagtgggagcacaccctgctggtcaccgaaaccggctacgagatcttcaccctgcgcgccgatgacaccatcccgcgcacgtcgggtgccgcgtcggcgtaaaagttgctcaggttttcccccactgcgttgtgactgactgattagatagaaaggaaaaccgatcgatgccccaggtggatcccgaactcttcgaccgtggccagttccaggccgagctggcactgaaggcaagccccatcgccgccttcaagaaggctatccgccaggcccgcgaggtgctcgatgagcgttttcgcagcggccgggatatccgcaggctgatcgaggaccgcgcctggttcgtcgacaacatcctgcaaaaggcctgggaacagttcaactggagcgaagacgccgatatcgccctggtggcagtcggcggctatgggcgtggcgagttgcacccctactccgacatcgacctgctgatcctgctggacagcgccgatcatgagatttttcgcgattccatcgagcgttttctcacactgttgtgggacatcggcctggaagtcggccaaagcgtgcgctccgtggacgaatgcgccgaagaagcccgcgccgacctcaccgtcatcaccaacctgatggaaagccgcaccattgccggccccgagcgcctgcgccagcgcatgctcgaagtcaccagcactgcgcacatgtggccgagcaaggatttcttcctggccaagcgcgctgaacagaaggcccggcaccacaaatacaacgataccgaatacaacctggagcccaatgtcaaaggctcgccgggcgggttgcgggatatccagaccattctgtgggttgcacgccgccagtacggcactctgaacctgcgtgcccttgctggcgaaggcttcctggtggaaagcgaaaacgccctgctggcctcgtcccaggaattcctctggaaagtgcgctacgccttgcacatgctcgccgggcgctccgaagaccgcctgctgttcgaccaccagcgctccatcgccaccctgctgggttttgaaggcgaagacgcaaagaccagcatcgaaagcttcatgcagcagtattaccgggtggtcatgagcattgcccagctcagcgacctgatcatccagcacttcgaagaagtgatcctggcacccgaagatgaagcaccgccgcagccgatcaactcgcgcttccaattgcacgacggctatatcgaggcgcgcaacgacaacgtgtttcgccgcaccccgttcgcgatgctggaaatcttcgtgctgatggcccagcagcccgaaatcaaaggcgtgcgcgccgacaccattcgcctgctgcgggaaaaccgtcacctgatcgacgacgacttccgtaacgacatccgcaacaccagcctgttcatcgaactgttcaaatgcaagatcggcattcaccgcaacctgcggcgcatgaaccgttacggcatcctcgggcgctacctgccggagttcggctttatcgtcgggcagatgcagcatgacctgttccacatctataccgtggacgcccacaccctgaacctgatcaaacatctgcgcaagttgcagtacacccaggtgtcggagaaattcccactggccagcaagctgatggccaagctgcccaagccggaactgatctacctcgccggcctctaccacgacatcggcaaaggccggcatggcgaccactcggaggttggcgcagtcgacgccgaagccttctgccagcgccaccagttgcccctgtgggacagccgcctgatcgtctggctggtgcaaaaccacctggtgatgtcgaccacggcgcagcgcaaggatttgtccgacccgcaggtgatccacgactttgccgggatcgtgggcgatgaaacccgcctcgactacctgtatgtgctgaccgtctccgacatcaacgccaccaacccgacgctgtggaactcgtggcgcgccagcctgttgcgccagctctacactgagaccaagcgtgcgctgcgccgtggccttgagaacccggtggaccgcgaagaacagattcgccgcacccaaagcgcggccctggatatcctcgtgcgcggcggcaacgacccggacgacgtcgagcagttgtggtcgcaattgggtgacgattacttcctgcgccacaccgccggcgacgtggcctggcacagtgacgccatcctgcaacaacccgccgatggcggcccgctggtgctgatcaaggaaaccacccagcgcgaattcgagggcggcacgcagatcttcatctatgcacccgaccagcatgatttcttcgctgtgaccgtggctgccatggaccagctcaatctgaacattcacgatgcgcgggtcatcacctccagcagccagttcaccctcgacacctacatcgtgctcgacaccgacggcgactcgattggcgataacccggtgcgcgtgaaaaagatccgcgaaggccttaccgaggccctgcgcaaccctgacgactacccgaccatcatccagcgccgggtaccgcgccaactcaagcactttgcgtttgcgccccaggtgaccatctccaacgacgcccagcgcccggtgaccgtgctggaactcagcgccccggaccgcccgggcctgttggcacgcattggcgggatattcctggaattcgacctgtcgctgcaaaacgccaagattgcgaccctcggcgagcgcgtggaagacgtgttcttcattaccgatgccgacaaccagccgttgtccgatccggaactgtgcctgcgtttgcaggaggccatcgtgcagcagctaagcgtcacccaggaacccggcgtcgaactcacacgcctgacgatataaattttaatgttgtgaacatggctcctgtgggagctggcttgcctgcgatggcatcgcctcggtgttaccgatacgccgcggtgcccgcatcgcaggcaagccagctcccacaggtctgtgttcaccgtgatagaggcttacatgaacaacgccctgaaccagctccagccctacccgttcgagaaactgcgcgccctgctgggcagcgtcacgccgaacccggacaaacgcccgatcgcgctgtccatcggcgaaccgaagcacaaatccccgcagttcgttgctgaggcgttgagcaacaacctcgaccagatggccgtgtacccgaccaccctgggcatcccggccctgcgcgaggccatcggcgcctggtgcgaacgtcgcttcaacgtacccaagggctggctcgacccggcgcgcaatatcctgccggtcaacggcacccgcgaagcgctgttcgccttcacccagaccgtggtcaaccgtggcgacgacgcgctggtggtcagcccgaacccgttctaccagatctacgaaggcgcagccttcctggccggggccaagccgcactacctgccatgcctggacgccaacggtttcaacccggatttcgacgccgtgacgccggacatctggaaacgctgccagatcctgttcctgtgctcccccggcaacccgaccggtgcgctgatcccggtcgacaccctgaaaaagctcatcgccctggccgacgaatacgacttcgtcattgcggccgacgagtgctacagcgaactgtacttcgacgaacaaaccccgccgcccggcctgctcagtgcctgcgtcgagttgggccgcgaggatttcaagcgttgcgtggtgttccacagcctgtccaaacgctcgaacctgccgggcctgcgttccggtttcgtggcgggcgatgccgagatcctcaaggccttcctgctgtaccgcacctaccacggctgcgcgatgccggtgcaaacccagctcgccagcattgccgcctggcaggacgaagcccacgtattggccaaccgtgacctgtaccgggaaaaattcgctgccgtgctggccattctcaagccggtgctggatgtgcaggcgccggatggcgggttctacctgtggccgaatgtcgaaggtgacgatgccgccttttgccgcgacttgtttgaagagcaatacgtgaccgtggtgccgggttcgtacctgtcgcgtgaagtggacggtttcaacccgggcgccgggcgcgtgcgtttggcactggttgcgccgttggcggagtgtgttgaagccgccgagcggattcgcgactttatccagcgtcgtcgctaagggccgtgcgggtcacttcacgtgacccaggttcgcttcactcatatccagatccgccaacacctccctcaatacgtcatcaccgatctggtgatgacggctcaagctatacagctccaggcgctgcgcccgcagggccttgagccgcaacttgcgttcaagttgatccatctgaagtgccaatgcctgcgcttcggccgagtcgttgaacacctccaactgatggcggtactcagacatcagacgagccttgagctctgcggccaaggcagcctgtgcggcgtcctgggtttcggtttcagcaggttcttcggcttcaagcgcatggatagcggcgaccgcggttttcttccaggcttcgcgcacctcgttgtggcgcttttcatccgggctctgttcgatcccgcgcagaagcagcggcaaggcaatacaagcggcaatcaacgacagcaggatcaccccggccgcaatgaagatcagcaggtcgcgctcaggaaaatcctgccccggcgccaacagcaaaggcaccgacatcacaccggccaacgtcaccgccccgcgcacgccgccaacggtcaacaacaggcaggaacgcgcagtgggcaccagcgtcagctcacttttcccacgcagccgacgtaacaggcccgacagccgccaaatgctttgcacccagataaaacgcagcaccaccaacaccacgaaaatcgcgatgacatcgaggcagcggtacaacagggtcggccacaacgtcggctcatggctcaccaccgccttgatgatgtcgggcagttgcagccccagcagcaggaaaatcagcccgttgaaagcaaattccaatagcgaccagacgctgcggttgagcaaacgtgtgctggtctggcggggaagcaagtccagccagctttgcatcatgcccgccgctacagccgagagaatgccggatgcgccgagccgttcagccagcacgtaagcggcaaacggcagcagcagcatgaacaccacgtgggtggccgggtcgtcccagccgcgagcgatcatccaggcgcgcaggcgcccgaccagccagctcaatgccacacctaccgccagcccgccgacggccaccagcacaaaggtcaagctggcgtccgccagggaaaatatcccggtcagcgccgccgccagggcgaacttgaaggtcacgaggcccgacgcatcattcatcaacgcctcgccttgcaacatatgcatcaaaggcttgggcaggcggttctgggcaatggccgacaccgccacggcgtcggtcggcgacaacacggccgccagggcgaaggccaccggcaacgggatcgcaggcagtagccagtgaatgaagtaaccggcaccgaccaccgtgaacagcaccagccccacggccagcgtcaggatcggcccgcgcaggcgccatagttcacgcttgggcatgcgccagccatcggagaacaacagcggcggcaggaacagaaacaggaacaactcagggtccagcgccacatgcagccccagcgtgggccaggccaacaaggcaccggcagcaatctgcaccaggggcaacggcagaggaacgacacgcccgaccagacgcgaaacgctgaccagcatcagcaggataagaacggtgtaggcggtttgcataacgcgggtttcccggacaatcgacttgcaacgacacacatcaggcaacaactggccgttgaagtgccatattacccagctatgttacgcggtggcttttgcacaaaagtcgcacttagtcataggcaagcatgacgagcggcacccaaagctgctggtcgtggcataatccgtgaccttccgttttcacacgctcaaagggggcaattccttgaccgcttcaagcaaaacgttgcacctttttggcatcaaagcctgcgacaccatgaaaaaggcgcgcacctggctcgatgagcacggcgtcagctatgcgttccacgactacaaaacggccggtatcgaccgcgaacacttgacccaatggtgcgacgagcacggttggcaggtggttttgaaccgtgcgggcaccacctttcgcaaactcgaagacgaacgcaaagccgatctcgatcagtcgaaagccattgaattgatgctcgcacaaccctcgatgatcaagcgcccggtgctcgatctcggtgacagaaccctgattggcttcaagccagatagttattcggcggccctcaagtaggccagcccttaccatttttgtagaggtaacagcatgtccaattccctgttcagcctgggcttcggcgtcggcactcagaaccgccaaggtgcttggctggaagtgttttacgcacaaccgttgctcaacccgtcggccgacatcatcaatgccatcgctccgatcctcgggtacaccgaaggcaaccaggcgatcaccttcaccgtcgcccaggcttcgcaactggccgacgtgctgaaaaatgtcgatagcgcccaagccgcactgctgacccgcctggccgaaagccacaagccactggtcgccaccctgctggccgaagacgccgcactgacttccacgcctgaggcctacctcaagctgcacctgctgtcccaccgcctggtcaagccccatggcctgagcctggccggcgtgttcccgcagctgccgaacgtggcctggaccagccagggcgctatcgacatcagcgagctggccgaacgccagctggaagcacgcctgcgcggcgagctgctggaagtgttctcggtggacaagttcccgaaaatgaccgactacgtggtcccggccggcgtgcgtatcgctgacgcggcacgtatccgcctgggcgcctacgtgggcgaaggcaccaccgtgatgcacgaaggtttcgtcaacttcaacgccggcaccgaaggcccgggcatgatcgaaggccgcgtgtcggctggcgtattcgtcggcaagggttcggacctgggcggcggttgctccaccatgggcaccctgtcgggcggcggcaacatcgtgatcaaggtgggcgaaggctgcctgatcggcgccaacgccggtatcggtatcccgttgggcgaccgcaacaccgtggaatcgggcctgtacgttaccgccgggaccaaggttgcgctgctggacgagaaaaaccaactggtcaaagtggtcaaggcccgcgaactggctggccagccggacctgttgttccgccgcaactccgagaccggtgccgtggagtgcaaaacccacaaatcggcgatcgaactgaacgaagcgctgcacgctcacaattaagcagccactcgatgccactggcgggccccgaaccggggctcgcttatacgagtcttgaataccatgcttgtgccctccccctggcgcgccgacttcccggccatcgccaccctgcaacggcaagaccagacttatctggacagcgccgccaccacgcaaaaacctcaagccctgttggatgccatcagccattactacgccaacggcgcagccaatgtgcaccgtgcccagcatttgccgggggcccatgcgacccaggcgtttgaagacagccgcagcaaggtcgcgcaatggttgaacgcaggtgacagcgggcaaatcgtgtttacccacggcgcgacctctgcgctgaacctcctggcctatggcttggagcatttattcaatgcgggcgatgagattgtcatcagcgccctcgaacaccacgccaacctgctgccctggcagcaactggccaaacgccgcgcactggagctggtgatattgcccctcggcgcggacggcgtgattgacctgcaagccgccgccgaactgatcgggccgcgtactcgcctgcttgcagtgagccaactgtccaacgtgcttggcgcctggcagccgttggaagcgctgatcaccatggccaagcctcacggcgcgctgaccgtggtggatggcgcccagggcatcgtacacggtcgccatgatgtgcaggcgctgggctgtgatttctatgtattttccagccacaaactctacggtccggatggcgtaggcgtgctgtatggccgccatgaagccctgcaccatttgcgccactggcagttcggcggcgagatggtgcagcaggcggactaccacagcgcaagcttccgcccggccccgctgggttttgaagcgggtacgccgccgattgccagcgtgatcggcctgggcgccagcctggattacctgagttcgctggatcagcaggctgttgtcgcccatgaagcagcgctgcatgattatttattgcgcggtttgaaggcgcgcaatggcgtgcaggtactgggttcaccgcacgtagcactggtcagctttgtggttgaaggcgtgcataacgccgatctcgcgcacctgctgaccgaacaaggcatcgccgtaagggccggccatcactgcgcaatgcctttgctcaaggcgatgcagctgtcgggggcgattcgtgtgtcgctggcgctgtacaacgattcggatgatctggaacgcttcttcgaagcgctggaccaggccctggacatgttgcgatgagcttgccgcttgatgcagtcgccgcactcgaagcctttctggctgtcggcagttgggaacagcgcgcgcgcatgctgatgcaatggggcgagcggctgcctgccctggcggatgcggaaaaagtcgacgccaacctggtgcagggctgcgaaagcctggtgtggttggtggggcgcttggaaaacggccattggcagttcgccgccagcagtgatgcacggatgattcgtgggctggtggcgttgctattggcgcgggtgaatggactctctgccgccgagttgcaagccgtcgacttgcccgactggttcaaccagctggggttgtcccgccaactgtcaccgtcccgcagcaatggccttaacgctgtcctgcagcgcatgcgagcgttgagccttacacaaaactaaatgtgggagctggcttgcctgcgatagcatcactgcggttctactgatagaccgaggctcctggatcgcaggcaagccagctcccacacaagccagccgtcacatttttgaactgagactcaggcaggtttcacccgctccgaaggcctgcgcaccccggccacaattttgtccaccgccttggtcgccgccaccatgccgaaagtggcagtgaccatcatcactgcgccaaacccgcccgcgcagtccagcttcacgccgtccccgacaaaactcttctgcaaacaaatgctgccgtccggcttggggtagcgcagttgttcggtcgagaacacacacggcacgctgtaatgacgagtcacggtgcgggaaaaaccatagtcgcggcgcaaggtcgagcgcactttcgaggccaacgggtcgttgaaggtacggttcaggtcgcacacctgaatcaacgtcgggtcaatctgcccgcccgcgccgccggtggtgatgatctggatcttgcggcgcttgcaccaggcaatcagcgcggccttggcgttgaccgcgtcgatgcagtcgatcacgcagtcgatgtctggcgtgatgtattcggccatggtgtcgcgggtcacgaaatccgccaccgcgtgaaccgtgcaatccgggttgatgccgcgcaggcgctcagccatcacctcgaccttgggcttgccgaccgtgctgtccagtgcgtgcaactggcggttgctgttgctgacgcagacgtcgtcgaggtcaaacagcgaaatctcgcccaccccgcaacgggccatggcttccgccgcccaggagcccacgccgccaacgccgacgatcgccacatgggccgctttcaagcgttccaggccttcaatgccatacaagcgggcgacgcctgcaaaccgtggatcttctgtgctcatgaccattaccccaaaaaccggcgcgcattatggactacacagcgacaagttcgaagcgacaagctacaagtaaagaacttagatggggtttcgctgactaacgtccggcttttctctgtctgctgtacgctcagggaagggccggtgtaggatgcgcgccgttcggcgcaggccgacacctcttttcgttccacaccctttggaacccgaaatagccatggcatcgcgtaaatttggactcaacctggtgatcgtgttggcaatcgccgcgctgttcaccggtttctgggcgctgatcaaccgcccggtcaccacccctaactggcctgaacagatctccgggttctcctactcgccgttccagcaaggccagttcccgcagaaagaccagtaccccaccgacgaccagatgcgtcaggacctggcgatcatgagcaagctgacggacaacatccgtacgtactcggtcgacggcaccctgggggacatccccaaactggcggaagagttcggcctgcgcgtgacgctggggatctggatcagcccggaccttgagcgcaacgagcgtgaaatccagcgcgccatcgaaatcgccaacagctcgcgcagtgtggtgcgggtcgtcgtcggtaacgaagcgttgttccgtgaagaaatcacccccgaagcactgatcgtgctgctcgaccgcgtgcgcgctgccgtgaaagtgccggtgaccacgtccgagcaatggcacatctgggaaaagaacccgcaactggccaagcacgtcgacctgatcgccgcgcacatcctgccattctgggaatttattccaatggacaaggccggccagtacgtactggaccgggcccgggacttgaagaaactcttcccgaaaaagccgctgctgctgtcggaggttggctggccgagtaacggccgcatgcgcgggggcaatgaaacctccccggccgaccaggccatttacctgcgtacgctggtgaacaagctgaaccgccaaggctacaactacttcgtgatcgaggccttcgatcagccgtggaaagtcagcgacgaaggctcggcgggcgcttactggggcgtgtacaacgccgcgcgccagcagaaattcaactttgaaggcccggtggtcgcgattccgcaatggcgcgtgttggccatcggttcggtggtgctggcactgctgtcgctgaccctgctgatgatcgacggctcggccctgcgccagcgtggccgcaccttcctgacctttatcgcgtttctgtgtggttcggtgttggtgtggatcggttacgactacagccagcaatacagcacctggttcagcgtgaccgtcggtatcttgctggccctcggcgccctgggcgtgtttatcgtgttgctcaccgaagcccacgaactggcggaagcggtgtggacccacaagcgccggcgtgaatttctgccggttgaaggggattcggactaccgcccgaaagtctcgatccatgtgccgtgctacaacgagccgccggagatggtcaaacagaccctcgacgccctggccgccctcgattacccggacttcgaagtcctgatcatcgacaacaacaccaaagacccggccgtgtgggaaccggtgcgcgactactgcgaaaccctcggcccgcgtttcaagttcttccacgtctcgcccctggccggtttcaagggcggcgcgctgaactacctgattccgcataccgccaaggacgccgaagtgatcgcggtgatcgactcggactactgcgtgtcgcccaactggctcaagcacatggtgccgcacttcgccgacccgaaaatcgccgtggtgcagtcgccgcaggactatcgcgaccagaacgaaagcaccttcaagaagctctgctacgcggagtacaagggtttcttccatatcggcatggtcacccgcaacgaccgcgacgcgatcatccagcacggcaccatgaccatgacccgtcgctcggtcctggaagagttgggctgggccgactggtgcatctgcgaagacgccgaactgggcctgcgtgtgttcgaaaaaggcctgtcggcagcgtattaccacgacagctacggcaagggcctgatgccggatacctttatcgacttcaagaaacagcgtttccgctgggcctatggcgcgattcagatcatcaagcgtcacaccgcgagcctcttgcgcggcaaggacaccgagctgacccgtggccagcgctaccacttcctcgcgggctggctgccgtgggtggcggacggcatgaacatcttcttcaccgtcggcgcactgttgtggtcggcggcgatgatcatcgtgccgacacgagttgacccgccgctgctgattttcgcgatcccgccgttggcgctgttcgtgttcaaggtgggcaagatcatcttcctgtaccgccgcgccgttggtgtgaacttgaaggatgcgttctgtgcggcactggccggcctggcgttgtcgcacaccatcgccaaggcggtgctgtatggtttcttcaccaccagcattccgttctttcgtacaccgaaaaacgcggataaccacggcttctgggtagcgatttccgaagcccgcgaagagatgttcatcatgctgctgttgtggggcgccgcactggggatctacctggtgcagggcctgccgagcaatgacatgcgtttctgggtggtgatgttgctggtgcagtcgctgccgtatgtcgcggcgctgatcatggccttcctgtcgtcgctgccgaaaccggcaccggcgccggagcctgctccggccgcgtaaaaacttgcgtaatgcactaaacggcggcctctggccgccgttttgctataagataacggccgttttgcgagtcttagccgagcgctgctctctgtgggagctggcttgcctgcgatgcagacgccgcggtctggcagacacaccgtggcgatgccatcgcaggcaagccagctcccacattggctctgcgtcgcctcaggctctgtattccacattcgtcctgcgcccatcacacgcttcccggagttttcccatgacggcccacgccgacctttcgccgaccctccaactcgctatcgacctgatccgtcgcccgtcggtgacaccgatcgacgccgactgccagaagctgatgatgcagcgcctgggcgacgccggtttcaagcttgagccgatgcgcatcgaggacgtggacaacttctgggccacccacggcacgcacgaaggcccggtgctgtgcttcgccggccacaccgacgtggtgccgaccggcccggtggcggcctggcagaacgaccccttcgacgcgttgatcgacgaaaacggcatgctctgcggccgtggtgcggcggacatgaaaggcagcctggcggccatgctggtggcgtccgagcgtttcgtcaccgactacccggaccacaagggctcggtggccttcctgatcaccagcgatgaagaaggcccggcgcaccacggcaccaaggccgtgatcgagcgcctggcggcacgtaaagaacgcctggactggtgcatcgtcggcgagccgtcgagtaccagcctggtcggcgatgtggtcaagaatggccgtcgtggctccctcggcgccaccctgaccgtgcgcggcgtgcaaggccacgtggcctacccgcacctggcgaagaacccgatccacctggctgcgccagccctggcggaactcgccgccgagcattgggacgacggcaacacgttcttcccgccgaccagcttccagatttccaacctcaactccggcaccggtgccaccaacgtgattccgggcgacctgacggcggtgttcaacttccgtttctccaccgaatccaccgttgagggcctgcaacaacgcgtcgcgcagattctcgacaagcacggcctggattggcatgtggagtgggcgctgtcgggcctgccgttcctcaccgagccgggcgccctgctggatgccgtatcggccagcatcaaggcgattaccggccgcgagaccaaggcctccaccagcggcggcacctccgacgggcgcttcatcgccaccttgggcacccaagtggtcgaactgggcccggtcaacgcgacaatccatcaggtcaacgagcgcatcctcgccagcgacctcgatgtgctgaccgaaatctactaccagaccctgatcaagttgctcgcctgatgctcgcttgccccctttgcagcgccccgctcaacgcggtggacaatggcgtggcctgcccggccgggcaccgtttcgaccgtgcgcgccagggttacctgaacctgttgccggtgcagcacaagaacagccgcgacccgggcgacaacctcgccatggtcgaagcacgccgtgattttctcaacgccgggcactacgccccggtggccaggcgcctggcggaactggcggctgaacgtgccccggcgcgctgggtggacatcggttgtggcgagggctactacaccgcgcaaatcgccgacgccctgccccacgccgacggctacgcgctggatatctccaaagaagcggtcaagcgtgcgtgcaaacgcaacccggcgctgacctggttgatcgccagtatggcccgcgtgccgttggccgatgccagctgccagttcctcgccagtgtgttcagcccgttggactgggaagaggccaagcgcctgctcagccctggcggcggtttgatgaaggtcggcccgaccagcggccacctgatggaactgcgcgagcgtttgtacgacgaagtgcgcgagtacaccgacgacaagcacctggccctggtaccggacggcatgagcctggcgcacagcgagacgctggagttcacgctgagcctggccgaacccaaagaccgcgccaacctgctggccatgaccccccacggctggcgcgccagcgccgagcgccgcgcgcaagtgattgaggcggccgagccgctgaaggtgactgtgtcgatgcgctacgattatttcgtgcttcaataaccgacttttaagcatccgcgaatggattttcgaatcccgcaacgaggaacatccatgcgccaacctgatatcgagatttacctgaaggacgccgacgtcgaccacaaggccattgccgcctggctgggcgccgcgttggggccgtgcaccgactgggtccagaagggcctgacctacaagtgcaaggccggcagcgtgcctgtgacctggttgcccaaggcggtaggcaaatggaacagcctgtacctggaaagcgaccagaccccgtgggacgacgacatcgcctgcgcccgcgccgcctttgccgcgctgaacgtggaagtgcgttgtgcgccgggtacgtgggttgaggaagaaggtgaagaaagcgctgatacctggattcgcatcagcgccgacggtgaagagcagatcacctggaaaactgcataagcctgaagtgtgaccccaatcaactgtgggagctggcttttgtgggagccgggcttgcccgcgatgcaagcacctcggtctgtcaggtagaccagagtgatgctatcgcaggcaagccagctcccacacaagcctgctcccacagttgcttgtggtgatgcttagagacccaccacatcctcggcctgcaaccccttctcgccagtcaccacggcgtactccacttgctggccctcggcgagcgaacggtggccctcaccgcgaatggcgcggtagtgcacaaacacatccttgccgtcttcgcgctgaataaagccatagccctttgcatcgttaaaccacttcacattgccggtttcgcgcgttgccatctgtcttactcccacatgcatttttattgttgagtcgcccgcattgaactgccgagtatatgacaggctcaaaaagcttcaactcaagtttatttagccgcttttttgccgattttcggcgaatacggcacactacccgcccgagcgcctgctcggttttttccacttgaagcagcacgcctatgacccgctccccgttccgccgtctggtgtttggcaccttgcgccggctgttgtacctctgggttcgctcagagacgatcaaccagtcgtccctaacccttaacctggaccgcagccggccggtgttctacgtcctgcaatcaccttccctcaccgaattggcggtggtcgacaaggaatgcaccaaggccggcctgccgcgcccggtgctgcccgtgtcggtgggtccgttgatggaacccgcggcgttcttctacctcaccccggaacccgactggctcggccgccaggacaagcgcggcgcgccgccgaccctgacccgtctggtcaataccctgaccgaacacgccgaagagaatgcacaaatcattccggtcagcgtgttctgggggcagtcgcccgaaagcgagtccagcccgtggaaactgctgtttgccgacagctgggcagtgaccgggcgcctgcgccggttgttgagcatcctgatcctgggccgcaagacccgtgtgcaattctctgcgcctatcaacctgcgtgaattgatcgagcacaataaaggtcacgaacgtaccgtgcgcatggcccagcgcatcttgcgtgtgcactttcgtaacctgaagaccgccgtgatcggccctgacctgtcccaccgccgtaacctggtgaaaggcttggtcaacatgccgctggtgcgccaggccatcgcggacgaggccgaacgggaaaaaatctccccggaaaaagccaaggcccaggccctgcgctacggcaatgaaatcgcctcggactacacctacaccgcgatccgttttctggaagtggtgctgagctggttctggaacaagatctacgacggcatcaaggtcaacaacgtcgaaggcgtgcaaaaggttgcccagggttacgaggtgatctacgtgccgtgccaccgcagccatatcgattacctgttgctctcctatctgctgttcaagaacggcctgaccccgccgcacatcgccgccgggatcaacctgaacatgccggtgatcggcagcctgttgcgccgtggcggtgcgtttttcatgcgccgcaccttcaagggcaacccgctgtacacctcggtgttcaacgaatacctgcacaccctgttcaccaaaggctttccggtggagtacttcgtcgagggcggccgttcgcgtaccgggcgcatgctgcaaccgaaaaccgggatgctcgcgattaccctgcgcagtttcttgcgctcctcgcgcatgcccatcgtgttcgtgccggtgtacatcggctatgagcgcgtgctcgaaggccgtacctaccttggcgagttgcgcggcgcgagcaagaagaaagagtcgatcttcgatattttcaaagtggtcggcgcactcaagcaacgctttggccaggtggccgtcaacttcggcgaaccgatcaagctggccgaattcctcgacgccgagcagccggactggcgcgcccaggagctgggcccgaactacaagccggcgtggctcaacgaaaccactaaccgcctcggcgagcaggtggcgcgccacttgaacgaagccgcggcggtcaacccggtgaacctggtcgccctggcactgctgtccaccacgcgcctggccctggatgaacaggccatggcccgccagctggacctgtacctcgcgctgttgcgccgtgtgccgtactcgccccacaccacgttgccggaaggcgacggcctggcgctgatcaagcacgtgaaagacatggacctgctctccgagcagagtgacgcactgggcaagatcgtgtacctggacgagcagaacgccgtcctgatgacctactaccgcaacaacgtgctgcacatcttcgccctgcccgcgttgctggcgagcttcttccagagcagctcgcgcatgagccgcgagcagatcctgcgctacacccgcgcgctgtacccgtacctgcaatcggagctgtttatccgttggtcgctggacgagctggacgccgtggtcgaccagtggctggaagcctttgtggaacaaggcctgctgcgtttcgaaaacgacgtgtacctgcgcccggcgccaagctcgcggcacttcgtgctgctgacgctgctgtccaagagcattgcccagacgctgcaacgcttctacatggcaatctcgctgctgctcaacagcggccagaacagcatcagcgccgaagagctggaagacctgtgcacgatcatggcccagcgcctgtcgatcctgcatggtctcaacgcgccggagttcttcgacaagagccttttccgacattttatccagacgttgctcgagcaagatgtgctgcgccgcgatgaagccggcaagttgagctaccacgacctgctcggcgaactggctgaaggtgcggcgaaacgtgtgctacctgccgatattcgcctgtcgatccgccaggtcgcgctgcaccgtgtcgatggcgcggcagagacaccggtagaccctcagccggtcaaccctgaagaaacccgctagatttaaaaaggcgccggttggatgccggcgccgttgaaaaggagctgtaccatgaaaaagatcatcctcctgggcctgaccgccctgctcggagcctgccaatcgatgaaccctgccccaaaggccagcctcgacggcgaagtattctacctgcagcgcatcgcattgccgcccgctgccaccttgagcgtcagcctgcaggacgtgtccctgatggacgcacccgccgtaaccctcgccgaacagaaaggcccggtcaaaggccaggtgccgttgccgtttcacttgagctacgacccggcccaggtcaagcctggtcacacttactcggtgagcgctcgcatcgagttggacggcaagctactgtttatcaccaccgaacggcacgctgtgcaactcaacggccaggatccacagccgctgcgcctgcgtgttgatgcagtagcccactgaattcgaacataaggaagccctcatgctgcgtaactcttttcgcctgactgcccttcgcctcactgccctgtgcgccggcctgctgcttggtaccaacgccatggccctggaccttggcagcctgtcccagggcgacgcctccggcggcctcaaggacgcgttgacccaaggtgcgcagatcgccgtgaaacaactgggcgtgcccggtggtttcagcaataaccctgaagtgaagatcggcctgccgggcaagctgggcaaagtcgccgacaagctgaaaatgttcggcatgggtgatcaggtcacacaactggaaaccagcatgaacaaggctgcggaatcggctgtgactcaggctcagccgattttggtcaatgcggtgaaaaacatgagcgtgaccgacgccaagggcatcctcaccgggggccaggattcggccactcaatacctgaacaaaagcagccgtgaccagatccgtgccaagttcctgccgatcgtcaaggcagcgaccgacaaggtcggcgtggcccagcaatacaacgccctggctggcaaggccgcagcctttggcgccgtggatgccaagagtgccaacgtggaaaactacgtgaccgagcaggcactggacggcctgttcaagatgatcgcgcagcaggaagaaaccattcgcaagaacccggcggcggcagccaccagcttggcgaagaaggtgtttggcgcgctgtaacccctccctcactgcgcccaggccagttttcccggcctgagcgcagctgtcttgcgctagtcttctagcggctcaacgaacagattggatacaaaggccgggtaggcggctgatgctcattccccgggtgtgggtgacagcaaaccggcttgaccggcttgggctgattgcacacgggtttggccggttgcaagcaatgctggccgggctgtccatggccacgtttgggcggcatgcctttttgaggatggtcatgaccgaccagggcctcaaaaagtgaaaccttaaaaccggcaaccgcattgaagagatgattcaacgacatctggcactccataaacttatcgaaacaggcccggctgccgattggcgaaaccaaaacccgcgcctgtccatcaggcaaatcttaagtggagtgaaacaaaggatcgttccgggtgcatcccatgcgctttgcatccggatgtgaaccggacctcgtcagcgcatgaccgagtcagccagcctccccatcatgatcacggcaaaacagcagatcgccacagccgttgcgcggttgatcttcaacggtgtcagccaggctttttgaaggccctcgaaccggctgcccaacacgatccaggccgtaccgaccggtaccactaccaaggcgagcatggccatgaaaccggcatatcccgccagcgtggcaaaggcgccaatcggcgcgataaacgaaacaatcagcaggcctttggggttcatcaccgtgagccagaaaaaatacccgccggagaaacggtcacggctcgggtcggtctcgccctgcttgcgctgccacaacgaataagagacatacagcaggtagcaggccgccagcgactgcgtggcctgcaacgcccaaggcgagtacgccgccagataaagcagcgccacgccccacaccgacacctgcagcagatacgccaggcactcgaccaaggccaacgcccacgaagcccgatacccgaacaacaccccggcccggaacagcagcgtgttggtcgggccaggggcaagcaataacaccatcaaggctgaaacggtggccagcatgattacgcgacgtccttcctcactcggaaccacgcagcatacagggccggcaggaataacagggtcaatgccgtcgccacaatcaacccgcccatgatcgccacggccataggtccgaagaacacgctgcgcgacagcgggatcatcgccaacaccgccgccagagccgtcagcacaatcggccggaagcgtcgaacggtggcttcgataatcgcttgccaaggcgccaggccggccttgatgtcctgctctatctggtccaccagaatcaccgagttacgcatgatcatcccggacaaggcgatggtccccagcatcgcgacaaagccaaagggctggcggaacaccagcaggaacagggtcacgccgatcaaacccagcggcgccgtcagaaacaccatcgcggtgcgtgagaaactgcgcagttgcagcatcagcaaggtcagcaccaccacgataaacaacggcacgccggccttcaccgaattctggccacgggcggagtcctccaccgtgccgcccacttcgagcaggtagccgtccggcaattcagcccgcacaccttcaagggtcggcaggatctgctggaccagggtcgccggttgttccttgccatagatatccgcacgaacggtcaccgtcggcaggcgattgcggtgccagatgatgccttcctcaaaaccgtattcgagagtggcgatctgcgacagcgccacacttttaccgttatcggtcggcactgccaggcttggcagcagcgacagttccgtacgctcatgcaccgtgccgcgcagcaggatttcgatcaattcgttgtcttcgcggtattggctgacgctggaaccggtcagggagctttgcaggaacttcgacaggttggccgtgctgacgccaagcgcacgggcgcggtcctggtcgatattcagatagacaattttgctcggctcttcccagtccagatgcacattgaccacgtgggagttttcgcgaaccttggccgccactttccgagccaacgcgcggacttcttcgatgtgctcacccgtcacacggaactgcaccgggtaccccacgggcgggccgttttccaggcgcgtgacccgcgagcgcaagtcagggaattgctcgttcagggtttcaatcagccaggtgcgcaggctctcacgctcttcgatggttttcgccagcaccacaaactgcgcgaagctggccgccggtaattgttggtccagcggcaggtagaaacgcggtgaaccggtgcccacataagccacgtagttttcgatgcccgcgtgctccttgagcagggcttccaagcgtttgacctgatcagcggtattgctcaacgaggcaccttcggccagtttcaaatccaccatcagttccaggcggccggaagccggaaagaactgttgcggtacgaaccggaacaatgcgaccgaaccgataaacagcagcagcgtcagcacgatcacggttttgcggcgacgcacgcaccattcgatcaaacgccttacacgctggtagaacggcgttccgtagggatcgggaccgtcggcaccgtgtttggccgcgtgaatcttcgccaggtccggcaggagcttttcccccagatagggcacaaacaccacggcggcgacccaagacgccagcaaggcgatggtcaccacctggaaaatcgaccgagtatattcaccggtgctcgattgcgcggtggcaatcggcaggaaacccgcagcggtgatcaaggtaccggtaagcatcggaaaggccgtactggtccaggcgaaactcgccgctttcaagcggtcgtaaccctgctccattttgatcgccatcatttccacggcgatgatcgcatcgtccaccaacaggcccaacgccaacaccaaagcgccgagggaaatcttgtgcaggccgatgccgaggtaatacatggtggcaaaggtcatcgccagcaccagcggaatcgccagcgccaccaccatgccggtgcgcacgccgagggagaagaaactcaccagcaacacgattgccagagcttcggccagcacctggacgaattctccgacgctggttttcaccgcagccggctggtctgacaccttgcgcagctccatgccggcaggcaggttcttttgcaggcgtgcgaattcgccttcaagcgccttgcccaggaccagaatgtcaccgccatcacgcatcgccacggccaagccgatggcatctgcgcccatgtagcgcatgcgcggcgctggtgggtcgttgaagccacggtggatgtcggcgacgtcgccgatacggaaggtgcgatcgcccacgcgaatcgggaagttgcggatctcttcaaccgtcttgaagttgcccgacacgcgcagttgtacccgctcagtcggcgtttcaaagaagcctgcggtggaaacggcattctgttcctgcaatgcctgctgcacggcggccaacggcaagccgagggtggcgagcttgaggttggacagttcgatccagatcttctcgtcctgcaggccgagcaactcaaccttgcccacatccggcacgcgctgcagttgaatctggatgcggtcggcgtagtccttaagcacggcgtaatcaaacccgtcgccggtcagcgcgtagatattgccgaaggtggtgccgaattcgtcgttgaaaaacggcccctggatatccggtggcaaggtctggcgaatgtcgctgattttcttgcgtacctggtaccacagctcgggaatttgcgccgaatgcatcgcgtcgcgggccatgaaggtgacttgtgattcaccggggcgcgagaaggagacaatgcgctcgtattcacccgtctccatcagctttttctcaatgcgctcggtgacctgacgcgagacctcctgggccgtggcccccggccaattggtcttgatcaccatggccttgaaggtgaacggcgggtcttcgctttgccccagcttggtgtaggacaaggtgccaaccaccgcgagcaggatcatcaggaacagtacgatctggcgattacgcagcgcccattcggaaagattgaaacccatggggactactccttgtttgccgccagattgaccactcggttggagcgatccaccgggcgtacttgctggccctcatggagtacatgcacacccgccgcaatcacccagtcattgggggtcagcccctccaggacgggcacggttttctcgccgaaggcaccgatacgcaccggcgtgcgcttaagcgtgttgtccggcagtacgcgccagacgtaggaagcaccgttctctgcactgagggcagacagcggcaccgacagcggaatcacgccttcagcttgtatgaaaacgcgcgcgctctgacccaattcggccgggaccttgccgccggtgaaggcgacgcgggcggcaaaggtgcgcgatttcggatcggctgccggtgacagttcacgaatgcgcccggtgaagcgttggtctggctggctccacaattcgaccgacaccggctggccaatcttgaagcggccgaaaccttgctcgggcaggctgatcagcacttcgcgctcgccgtcggtggccagggtgaacacggtctggccagccgataccacttggccaacttccacggcgcgcttggccaccaccccatcctggggtgcacgcaacacggcgtaacccgcctgattgctggacacgtcaaactcagccttgatctgtttgaggcgcgcttcgccggatcggtaaagattttcggaattgtcgtactgggaacggctgaccatctgacgatccatcagcgtcttgtaacggtcacgttcggcacgcaccaggctcaggttagcctcagcagcggcgacctgggcgcgagtggcttccagttgcaggcgcacatcctgagggtcgagttccgccagcggctggttggccttgacccgctcgccctcctccaccaggcgcttgctgactttgccaccgatgcgaaaggccagatcaggctcataccgcgcgcgcacttcaccggggtagctgtccgttgcctgcgccgaaggttgcggttgcaccaccatggccgggcgaatggacgtttgggctgcttcttcgtggccacaggcggccaacaggaagatcagactgacaggcaacgcaagaggcaggaaagtgctgcgcatgctgaaggacctttcgcaaatggagctaggaataattatactggcgggtatgttattaataccaaactcaccagtccagtattaaaggtgaaaatgtccgacaatcctgtgaacaccaatagccccgggcgtcccaaggacatggcaaaacgccaggcaatcctcgaagcagcgaaaaccctgtttttgagcaatggttacgccagtaccagcatggatgccgtggcccttgaggccggcgtatcaaaactgaccgtctacagccacttcaccgacaaagaaaccttgttcaccgccgccgtggtggccaagtgcgaagagcagttgccggtgatgtatttcgaactgccggaaggcatgcccgtggaaaccgtgctgctgaacatcgcgcggggttttcatcggctgatcaacagcgaggagtcggtaaacctgcatcgcttgatgatgaccaccggtaatcaggacgtaaaactttcgcagatcttctttgaagccgggccaatgcgcatgctgcagggcatggaacgcctgctcggcaagatcgaccagagcggcgcgctgagtatcgacaaaccgtttacggcggcggagcactttttctgcctgctcaagggcacggcgaatttttgcttgttgtatggctgtggcgggcagttgagcgaggaagccgccgaggagcatgtgcaggaggtggtggggttgtttatgcgggcttatcggccctgaaccttgtgttgcctgggctggcgccatcgcaggcaagccagctcccacatttgaaggtattcacacatcagaatgtgggagccgggcttgcccgcgatggggccctcaaggtttaagcgctttcttgggatagatgtcataccggctggacttgccatccagcgcatggctcggcttgggcccctcaatgcacggtgccttgcgcgggcgcttgaccactacacggtggctggccagtgccagcgcggccgccagcaacgccggggcatccgtgtcatcgcccaccagtggccgaaacaggcgcatctccttcttcaccagcgccgttttctcccggtgcggaaacatcgggtccaggtagatgacctgcggcggttcgccttcccagttaagcatcacgtcgatggagttgcccttgagcagcttcatgcgcgccacgatcggcgccacgtcaaagtcatccgcaccgcgtgccaggccgtcttcgagcaaggcgccgatcagcggctgccgctcgatcaaactcatgtcgcaccccaggctggccagtacgaacgcgtccttgcccaacccggcggtggcatccagtacccgtgggcgcacgccctgggcaatgccgaccgctttggcgatcatctgcccgctgccgccgccgtataaacgccgatgggccgcgccaccttcaacaaagtccacgcgcaccgggcccggcgcgtcaggcccaagctgttgcagttgcaggccgtgttcgccgacctgcagggaaaagtccgcttcatccagctgcaaaggcaggccaagcgcggctgcccattgctcggcacgcgcctggaaaccttcggccaaagcctcgacccgaatgcggctggccgctggttgttcgctcatcaatcactacgctcaaaaatattaaggatcggcaaacaacggccgataaaaacaacagtcaggtattttgccagagctgagcgtcgaccgagaaaaatgtcagacattcttcccctaaccatcggtgtactgccgacccacaaccactacggcctgcgcaatactcaagcgctggccggagtgagccatgtgtggcaggacttcttcgcccgtgcgctggccgagcagcttggcgatacgccacaagcccttgccgccaaagcgccggtaccgaaggacccggcggttgaacccagcgaaggcgccgacttgctgtcgcaaatcctcacccagcgtgagtgcgacgtgaaagacaccgaaatcgccccgcccgagccgctgttcctgccgatcgccgaattcgaaaccgaactgctgccgcctccagccacgccgttcccgccggacgagctcgttgcccaacaacgccagcagaactttgaaagcggctgggtacgcccacttgtactgaatgccggccagccacagcccgagcccggcccggcgccggaaccacgcccgctgcacctgccgattgccgaattcgaactggacctgctgccacctgccgccgtgccatatccagcggacgaattggtggcgcaacagaaggcgctggatttcgactaccactgggcacgcccgctggtcctcaacaacctgcgcctggccgcctgactcagtctttgaaaaacgcgttggcctggctgaacggcattttgcggtcggtgaacgtgaacgtacccaactcatacacttcctgcgccgcccgatagaactcgccataggccgccagagccatggccgagcccacgctgatacgccgcacacccatctcgctcaactgcgccacgctcaggttcaaaccgccggacatcaacacgttgacaggctttggcgcgaccgccttgaccaccgccagcacctcttcggcattgcgcagacccggcgcatacagcacgtcggcgcccgcctcggcgtaagcctgcaggcggcgaagggtgtcaggtaaatccaggcgaccatgcaggaggttttccgcgcgggccgtcagagtaaaaggaaacggcaggctgcgcgcggcagcgacggcggcttccacgcgctcgacggagaggtcaaaaggataaatcgggtcggcagaaatacccgtcgcatcttcgatggagccacccacgatgcccgtagcggccgcacgcaaaatggtttgggcacagccctctggcgtatcgctgaaaccgttttccaggtcagccgccaccggcaatgcggtcgcgcgaacaatcgctgaagcattgcccagtgtgtcttccagcgacaacgccccttccgcatccgggcgccccaggctgaacgcgaaccccgcactggtggtggccagcgcttcaaaacccagactggcgagcatgacggcggaaccggcgtcccacgggttgggcatcacgaacgcgcgatcacgctcatgcaaggccttgaaggtttcggcgcgaagggtttgggcatccatgactgactcctggcggaaaaaggagccttagagtaaccccagttgctccgcttcgggttctcgatgcagggttggcagtggtggcaaaccgggcaggcgtatcatcagtttgtcgtgaaagcgcagcgccaattgtgcggcgagacggttatccgaggtgtgcaggaacatgtacggcgtgcgcccttcttcgatccataccgcgatcttctcgacccaggggatcaggaacggatcattagcctcaagctccgggtggccgataaatcgtacttggggaaacagggtcaacgccgccgggcgtggcggcaccttgggctttttcgattgggcgtgcagcacggccgcggaggtggacgtgcaactgaacagcgcgcgcggatcaaggcagatgcgttccacgccacggtcgcgcagcaggcggttgaggctgcgctcggcatcgcccttggcgaagaactccgggtggcgcacttccacggccagcgggcgctccagcccatcgatgaaacccgccagctcggccaggcgcgatggcgagaagttcgccgacagttgcagccacagcggcgaaacgcgctcgcccaacgggctcatcaagccgacaaaactttcggcagccggtaattgctcgcgcaagtcaccaccgtggctgatgtcgccggggaacttggcggtgaagcgaaaatcggcaggcatgatttcggcccaacgctgcacggtggcggccgagggtcgggcataaaacgtggtattgccttccaccgcgttgaagacttgagaatacagcgacaggtaatcgccggagcgtgcgtcagcaggatacaagtactcgcgccaggcgttttcactccaggacgggcaaccaataaagtaaggcaggcgcatcagatatggatgtcgagacccagcacttccatatcccattcgacaaagccggcggtggtcaggtagctggccagggcggtggcgacgcttttgctcatggagcgggggaagatcatgtcttgctgacgggcaggaaggccgctgatacgcgcttgattatggggttgtgcatcggattggacttcgatgaagtccggcgaatcttcgacggaatcgtctaccgtgacgtttgccttacgcggcttacgcttgatggggtaggactgtgaggaaaagccgtctatacgcatggacgcgaactcggtatcagtgatggcattttagtggcgcgatccgtggcgcgcaaatgctctggtgataactagaacacataatttgtaaaaggtttagaaacaggggcaaattctgacgattggagatttttgccccacattgcccacctttttgacgtcaaataatcccgcgctcagccttggtttgcgccactttatcgcgcaaataaaccggcgcagcctgatcggcgggaatggcttcgccacgctcgaaagcgaaacgcgccaggctcagcaagtcttcggcatgaggcagcatggcggcatcctggcccaccgttttcacaccgatgcgctcgccataaccccaaccggtgcccgcaccgaaccagtcaccgctagcatcctcgggcagctcagaagattccggcggctgcacggcttccacccccaccaggcgcatttcgccggcagtttcgcggtagcagccccagtagacttcatccatgcgcgcatcgatggccgccgcaacctgggaggtgccgtgctcacgcaatgcacgctgagccagtaccgccaggttggagactggcaacaccgggcgctccagcgcaaaggccaggccctgcaccacgccgatggcgatacgcacaccggtgaaggcgccgggaccacggccaaaagcgatggcatccacggcagacagtgtagtgcctgcgtcttcgagcagttgcttgatcatcggcaacagcttctgcgcgtgcaggcgcgggatcacctcgtagtggctcgtaaccttgccatcgtgcagcaaggcaacggagcaagcttcagtcgcggtatccagggccaacagggtgctcatcggtgcgggtgtccaggtcgaaaaaaagtgcgccagtataaacaacaacggcccgctagcgggccgttatccgtgaagccggtggtgcgctcagctcagtgcttgcagcactttggcggtgatcgcttctaccgagccgacgccaggaatgtggctgtacttcggcttgccctgggcggcggacagcttctggtagaaatccaccagcggcttggtttgggaatggtagaccgacaggcgatgacgcacggtttcttccgtgtcgtctttgcgctgcaccaggtcttcgccggtgatgtcgtccttgccggccacttttggcgggttatagacggtgtggtagacgcggcccgacgcttcgtgaacgcgacggccagcgatacgctgaacgatttcttcgtcttcaaccgcgatttcaaccacggcgtccagctcgacgccagctttcaccagcgcttcagcctggggaatggtgcgtgggaagccgtcgaacaggaaaccgttcttgcagtcttcctggctgatgcgttccttgaccaggttgatgatcaggtcatcggaaaccaggccaccgctgtccatcacgctcttggcgatcaggcccagctcggtgccggcctttacagctgcgcgcagcatgtcgccggtggagatttgtggaatgccgaatttttcagtgatgaactttgcctgagtacctttaccggccccgggagctcccagcagaatgacgcgcatcgatgtgctcctcaattttttatagagatgacgctcggattcgccgcgtggggcaaatctcgtaaaaatgggttcagaccgatcaaacggccaaaggctgatcaagatacacagcgggccctatccatacaagccgccgaaagtcgcagcaacccgcccccggcatgcgtcacaggatgggtatgcctgagcgccacccgccaccctaaacaccgaccgcccctttcagggcagccgctgctgtttatacgcaagcctttgagaacacgcgaaaaacctcagccggtgttacgcaaacccgcggcaatacccgccacggagaccagcagcgcctgttccagagggctgtcctgcgcggcttcctgttttcgcgaacgggccagcaactcggcctgcagcaggtgcaacgggtcgaggtaggtgttgcgcaggcggataaactcaagggtgtccgggctatgagccaacagttgcgactggccagtcaggccaagcaccacgctgcatgcctgcgacaataggtcgcgtaagtgcgcacccaatggcagcaggtcgggctgcaccaagcgctcgtcgtacaggcgggcgatgtcggcatccgccttggccagcaccatttccagcatatcgatgcgtgtgcggaagaacggccactgctcgcgcatctgccccaacaaatcgccttcgccacgttccagcgccttgctcagggccgcttcccagccaagccaggcgggcagcatcaagcgggtctgggtccagccgaaaatccagggaatggcacgcaggctttcaatgccaccggcacgccgcttggccgggcgactgcccagtggcaaacggcccaattcctgctccggcgtggactggcggaagtattcgacgaactgcggattttcccgcaccacggcgcggtaagcgctgacaccgtctgccgccaattcatccatcaaatggcgccaggccggctcgggcggcggcggtggcaaaagcgtggcttcgagcacagccgccagatacaggttgaggttttgctcggcgatgtccggcaggccgaatttgaagcggatcatctcgccctgttcagtggtgcgaaaacgccccgccaccgaacccggcggctgcgacaggatggccgcgtgagccgggccaccgccacggccaacggtgccgccgcgaccgtggaacagcagcagttccacctgttgttcacggcagatctctaccagacgttcctgcgcccggtattgcgcccaggcggcggcggtggtgccggcgtccttggccgagtccgagtagccgatcatcacttcctgtggcccttgcaagcgcgcgcgatagcccggcaattgcagcaggcgctccatgaccggcccggcgttgtccaggtcagccagggtttcgaacagtggcaccacgcgcatcggccgttgcacgcccgactctttgagcagcaattgcaccgccagcacatcggacgcggcacccgccatggagatgacatacgagcccagggaagcctctggcgcagccgcgatttccttgcaggtgttcaacacctcggcggtgtccgccgacggtttgaaataccccggcagcaatggccgacggttggccagctcttgggtcagaaaactgatgcgcgcctcttcgtcccagtcttcatagcgaccgaggccgaggtaatcggtaatttcagtcatggccgcgcaatggcggctggaatcctgacgcacatccaggcgcaccaggaacaggccgaaggtcacggcacggcgcaggcaatcaagcagcgggccatcggcgatcacgcccatgccgcactcatgcagtgattggaagcacagctgcagcgggtctagaaggtcgcggttgttttgcaacacttcagccggcgccggggtggtggcggtcaacgaggtatgcgcccattggcgcgtggcgcgcaggcgttcgcgcagttgcttgagcaaggcgcgatacggctcgacactgtcacccaccttggcctgcaaagccgggctggcccgttgcatcgacagctcggaggccaagtgatcaacgtcccgcaggtacaaatccgccgccatccagcgcgccagcagcagcacttcgcgggtgaccggcgcggtcacgttcgggttgccgtcacggtcgccgcccatccacgaggcaaagcgaatcggcgccgcctccagcggcaaacgcaggccggtggcggcgtgcagggcctggtcggccttgcgcaggtaattggggatggcgtgccacagtgaatgctcgatcaccgcgaagccccatttggcctcgtccaccggggtgggccggatgcggcggatttcttcggtgtgccaggcttcggcgatcagccgttgcaggcggtcgcggatctgttcgcgctcggcggtggtgaggtcgcggtggtcctgcagcgccaactgcgcggcaatcgcatcgtatttctgaatcagggtgcggcgcgccacttcggtggggtgggcggtgaggaccagttcgatttccagccgcgccaactggcgggccagggattcgttgctgtgaccttcgctttgcaagcgggccagcaactcgggcaataccctggattcgaacggcgccggctgcgactcatcgcgccgatgaatcaactggtactgctcggcaatgttggccaggttcagaaactggttgaaggcccgggccaccggcagcaattcatcttcctgcagctggttgaggctggcgctcagttcgtcggcgccgcccccgcggtcggccttggcgcctttgcggatctgctcgatcttgtcgagaaattcatcgccgtactgctctcgaatggtgttgcccaacagctcacccagcaggtgaacatcctcacgcaagcgtgcatcgatatcactcatcagccaatctccagccagaaatccgggacgcgcagatgttccagagtgccgtccggtgcggtttctgacaagacactttaaaccttggcgcttgcagctagtctcaacagtaagccgccacgttatccacgcggtggccggtcactcatcaccgcccgtaacacgcgggcttaactgaggttgccatgaaaattcgagaattggcccagcattgggaagagaacgccaaaggtcgcctgaccaaaaccgaatacgcgattcacctggacgtggaatccgccgcacggctggcggccattgccgagatgtaccccaaacgtcaaaccgaagagctgctgggcgagctgatcggcgccgcccttgaagagctcgaagcgagctttccgtacatcaaaggcaagcaggtgattgccaccgacgaagagggcgacccgctgtacgaagacgtcggccctactccgcgttttctgactttatcgcggcgctatctgcatgatttgtcagccagtgctgacgaacagaagcactgataaacattcctgactctttataaaacccttgtattccgggcctcgcagaggcccggcgtaccgctgcgtactgcaaaagttccaacttttaaacactgaccaatgagtcagaaatttttttaggcaaatcgccatcttctctgaacttttgaaaaaagcctccggtcacagcaggtaagccatcacttggaacggttgtttgaacaggcgtcacaggctttaccgccgggccccgcgagcaaccgacagcgatggaatttgatgtttttcaggagttatccaatggagttgaagacgatgaagaccagcactgccaaatcctcgtttaaccacctgcgcgggctcaaattggccgcgctggcaatcggcaccagcttcattctggccggttgcgccggtaacccgccgaccgagcagtacgccgtgacccagtctgcggtgaacagcgcagtcagcgccggtggtaccgaattcgcacctgtggaaatgaagtcggctcaggacaaactcaaagccgccgaaatcgccatgcacgacaagaattacgacaaagctcgccagctgtctgaacaagccgagtgggatgctcgcgtcgctgagcgtaagtctcaggccgccaaagcccaacaagcggtgaaggactctcagaaagccgtggatgagctgcgtaaggaaggtatgcgccctgctgtgatccaacagcaataagccacctccccttgactgcatcgcacctgatatcgaattgaaaggacgacacgactatgcgtaaacaattgatgatccctgccctgctggcgatgagcgttgccttggcggcttgctccaccccgcctaacgcgaacctggaaaacgcacggaccaacttctcggccctgcagaccaacccgcaatcgaccaaactcgcggcgctggaaaccaaagacgccagcgagtggctggacaaggctgacaaagcctaccgcgacaaggaagacgagaagaaagtcgaccaactggcttacctgaccaaccagcgcgttgaagtggcgaaagacaccatcgtgctgcgcgaatccgaagccaagctgaaaaacgccggcgacgagcgtgcccgcgcactgctggacgcccgtgacgcgcagatcaagcaactgcaaaacagcttgaacgccaagcaaaccgaccgcggcaccctggtgactttcggtgacgtactgttcgccaccaacaagtccgacttgaaatccagcggcctggtgaacatcaccaagctggctcagttcctgcgcgacaacccggaccgtaaagtgatcgtcgaaggctacaccgacagcaccggttccgactcgtacaaccagagcctgtccgagcgtcgtgcggcttccgtacaacgcgcactggcccagcaaggcgtggacatctcgcgcatcgtgacccagggttacggcaaggaatacccggttgccgacaacggcagcgtgtcgggccgtgccatgaaccgtcgcgttgaagtgaccatctccaacgacaaccagccagtcaagccacggtcttccgtcgctaactgattcgttgtcgaaggataaaaaacccacctttcggtgggtttttttaggcttcggaagaagtgtttattgagcctttgctatcgccctgctccaacattttgccaagcccttcgctgcctgaagcccgttttttgagctcgtcttgtgaagccccttcgccaccgtccagcattttcatgagctgctcaatatcaatcccgcctttcccaccgcccgcttgaccggcaccttgcccgccgccttgctgaccgccctggttcaggctttcaagacctttgatcatctccatcatcttgccagcagcacccatcaaaccatcaaggcccggtatcatcgtcacactcccagattcgctatgcgtaagttgatgccagcggcgctgacactcccagtcagtggtgacttacacgatacggttccaaatatttctacggcgataacctgcggatggagagtgggcctactcctgtaattgaggggtttgctggcccatgcagcgcacagcctgtttcttgttgttcaccagtacaccgctcaagcctttctgctcggtatcaaacatcaccagcacgccatccacgcattgcgccacttgcgcggccggggtcagggagattttgtagtcctcgcccggcacggtcttgagcagggtgaagtcgctgagcagcaacgcgtcctcgggcttggcgaagtgcaagtagccgtagtaccacaggcagccaacggtgccgatgatggtgccgatgccggtgaggatcagcgggatcatgttgcgttcttcgctcattgcgggctctctgatgaatcagtttttggagtcggataattcggaatctcgcccaggcggcgcagaccattgaagtgctgcgggtcgtccagatagcgcagcatcacggtttgccaagtcttgtcggcaaaggtctgcacatgcccgccgcgcgtcaattgcagcactctcggtgccggggcagcctggtacaggcggataccgttggccagcggcacgatcgggtcatccaggctgtggaacaacagcttgggcacgccagtcagccggggcatgccattgatcgcactgtcgccatcgggcaccagccaggacaagggcacttgaaacggccatgttaaccaggaggtgctgagggcgaattgtcctacgtcacgataactggcaggcacgccgtccagcaccagcgctttgagttgggtttggcgctcgggatgggccgccaggtaatgcacagccaatgcgccgccaaggctctggccgagcacgataagcggttggtgccgggtttcaggggctttgtcgagccaactgaaagcggcgtcgatgtcctggtaaaccgccggcaacgacggcttgccctcggacaggccatagccgcgatagtccagcagcaacacttggtagccctgctccggcagccaccaactcccccccaagtgccaggcgaggttgccgccgttgccatgcaagtgcagcaccgtgcctttgagcggcacgccgggtttggccggcagccaccaggcgtgcagcttcacgccgtcggcggtggtgagggtaacgtcgcggtattgcaggtgggctttttgcggcgtgaacggcaggccgggctcggggtaaaacaacagggagctgcagccgttcaatgtgagtagcaggcaaagaatgccgaggattctcatccgttgaagcctcgctggtaggttttactgatttctcaagaatgaatgagatcaactgtgggagctggcttgccagcgcccacattctgaacctggtttcttcagaggatattggagtaatccgcttcgatccggtccaggctcaggtggttgaggaagttggagaaacacatccacgccgccagcgcgttcatgtcgcgaaactgctccggcaggtatttgggcggcaccaccaggccttcgtcgaccagttggcgcagggtgcgcatgtcttccagggtggtcttgccgcagaacagcagcggcacttgttccagcttgcccttgcgcacggcgagctggatgtagttgtagaccatgatgaagcccttgaggtaggacaaatccttggtaaacggcagacccgtcggcacagagccgcgaaatacgcgactggcattgccgtagctttcagccatttcaaagccctgctcacggaagaactcgaacacctgcaggaagtcggcgccctcctccaccatgtgaatcgcgcgggtgcggttggtcaatttgcgcaggcggctcgggtaagaggcaaacgtgatgatctccatcagaatcgccaggccttcctgggtcacggtggacgacggcgggcccttggacagaaaggtgcagatcggctggttctggccattgagcgtagtgcccacgtgaaccaagccttcatgcacttccagggcgcgtacatcgcggtcgttgaacatcgcgtcggcgcggatcttgatgtagtcggcccccgccgccgcgtcggcgacgatgccgtcggactcgaacacgcggatggtttcctcggcctcgccaaacaccttgttcagccgggtttgcagcagggccacggcgtccttggccgtgagggtcttggcttcatccttcaagtcgccacggccgtcgatattgttcaggtagtcggacagcatcaggcccaggtcagccaaggtcgggtcgccggcgtggaacgcgtcggaggcggcgccgtaaagctcctgggagatcaggccgaaatcctcggtgccgcgcgcttcgagcatgcgcaccaccatgcggtattcacggcacatgcggcgcatgatctgccccaccgggctgaactggccgaggcggcgggtgatgtcgcgctcaatgttctggaattccagcttcacggcgctggagtcgaacgacagcggccggttgaggtagtaatcgcggtccacggcaggcatggccttgcctttggccttgagaaatccctgacgaatgttttcgtcccacttcacggcgtcgaggacacgaatcggtgtttgcgccagcacaatgcgatcagacaaggtgcgtatcgtctgctggtaatcgtccacccggtgcttcctctttaaacgttatttacccgtgcgcttgtagcgcacggcttcaacgaacacatcggcattggccgggtcatccaggtaagcaaatacctgttccatggggctgtcgaccagcacgccgtcgccttcgacggtttccacgatgctgccgtgcaatgctttctgacctatggcttgatgaatttgctcaaggtcgaggttgtagaccaccaattcatgtttttcgtcgaactcaaagccggcaaggatgaaatgcccacccagcctggccggcagcggcgccgacaaataccagcggctgccatggtgcgacacggtaaatacatattcatcgcgctggccgggcttggctttagggtagctcacagctttatagcgatgctcaccggcgtgagtgatctgcaaattgagcggctcgccccaggcgtttttgctcgaccaatggccaatcaaggcctctggcgcggcttcacgggcgggcaaggggtctttgaaggtgaccaggcaaccgctgagcagcaggaacgacaagctgattactgcgacacgccaagctttcatccaataccccgtcaagtgtgggagctggcttgcctgcgatacaggcacatcggtgtttcaagctaaccgaggtgtctgtatcgcaggcaagccagctcccacataaagcggatcgcgcataggtttggctagaccgacgccaacaccaaatgcatgtaacgcttgaggatctcaagcatctcttcaccggtcagaggctctgggccgccaagcaggccctgatattccatccgaccgattatcgccgtcaacactttggcatcctgttgtggctcgcgcgaacccagcatctggaaaaactgcccggtgccttgcagcaggatctgttggtgggatcgcaccaactcggccaggcgtgggttcagcaacgcttcctggcgaaacgcctgctcggccatcaggtgttcgcggcggttggccagttggcgctgcacatagtcggcggtcagccgcgcgatgtcatcggccagttgcgaacgcgactgcgggctgccatcaccataggcgaccatctcgcgcagcaggccttcattgcgcacccacaacttgcccatgaaggccgcgctgcgttcgacgtattgggcgaaggtatcggtgagcaggtcatcgatgtccttgaaatagtaagtggtggccgacaacggcactccggcctctgccgccacggcgcgatggcgcacgccacgcacgccatcacggaccacgatgcgcatggcggcatcgagaatatcttgcctgcgttgctcgctgccccggcgactggccttgcggccctggtactggacactttcagccacggctgcagcaatgccggcggcgccttcttgagccattacgcggttcacgacagttttcctctaagggtgacgcaaagcgtcacgggctgcattcccacccagagtgtgggaacgatcacctggcgccgttctgttgacggctgaatacgccacacaaaaaagccgccttataaaaggcggcttcggatttcactacggttacgcttgcggccgcatgtgcgggaacaggatcacgtcccgaatcgacggcgagttggtgagcaacatcaccaaccggtcgatgccgataccttcaccggccgtcggcggcatgccgtattccagcgcgcggacgaagtcggcgtcgtaatgcatggcttcatcgtcgccggcgtccttgtcggccacctgggccatgaaacgctcggcctggtcttccgcgtcgttcaactcggagtaggcgttggcgatttcacggccgccgatgaacagctcgaaacggtcggtgacgttcgggttgtcatcgttgcgacgggccagcggcgacacttcgaacgggtactgggtaatgaagtgcggctgctccagcttgtgctcgaccagctcttcgaaaatcatcacctgcagtttgcccaggccttcaaagcccagcaccttggcgccagctttcttggcgatggcgcgggccttgtcgatgtcgttcaggtcgtcagcggtcaactcagggttgtacttgaggatcgagtcgaaaaccgacaagcgcacgaacggctcgccgaagtggaacaccttgtcgccgtacggcacgtcagtgctgcccagcaccagctgcgccagctcgcggaacagttcctcggtcaggtccatgttgtcttcgtagtcggcgtaagcctggtagaactccaacatggtgaattctgggttgtgacgagtcgaaacgccttcgttacggaagttgcggttaatctcgaacactttttcgaagccgccaaccaccagacgcttcaaatacagctctggcgcgatacgcaggaacatttccaggtccagcgcattgtggtgggtttcgaacggcttggctgcggcaccaccggggatggtttgcagcatcggggtttccacttccaggaagtcacgtgccatcaggaagctgcggatgtgcgcaatcacttgcgaacgcacgcggaaggtctggcgcacgtcttcgttgacgatcaggtcaacgtagcgctggcggtagcgctgttcggtgtcggtcaggccgtggtgcttgtccggcagcgggcgcagggatttggtcagcaggcgtacgctggtcatttcaacgtacaggtcgcccttgccggaacgggccaaagtgccttcggccgcgatgatgtcgcccatgtcccaggttttcaccgaggccagggtttcttcggacagggttttacggttgacgtagacctgaatgcgcccggtcatgtcctggatcaccatgaacgagccacggttgagcatgatgcgacctgccaccttgaccgggattgcagcctctgccagctcttccttggttttgtccgcgtactgtttctgcaaggcatcgcagtagttttcgcggcggaagtcgttcgggaaggcattgcccttggcgcgctcggcagcaagcttttccttgcgcagggcgatcagggagttttcttcctgttgcagggcttgcgggtcgagttgttggtcgctcatgtctttagattttccatcaggttcgttgccccagccttcggctggggatcgcgggcaagcccgctcccacagggatcgcggagtgtcaggcaatcccgcattgcgtgtgttacaggcccgatttcaggctggcttccaggtattcgtcgatgtcgccgtcgagtaccttgtcgcagtcgctgcgttcgatattggtgcgcagatccttgatccgcgacgcatcgagcacataggaacgaatctggtgaccccagccgatgtccgacttggtgtcttccagcgcctgcgacgcggcgttgcgtttctgcatttcctgctcgtacaacttggcccgcagcattttcatggcggtgtctttgttggcgtgctgggaacgttcgttctggcagctgaccacggtgttggtcggtacgtgggtgatacgtacggccgagtcggtggtgtttacgtgctgaccaccggcaccggaggagcggtaggtgtcgatgcgcaggtcggccgggttgatctcgatttccaccttgtcgtcgatctctggcgagacgaaaacggcggagaacgaagtgtggcgacggttgccggagtcgaacgggctcttgcgcaccaaacggtgtacgccgatctcggtccgcagccagccaaaggcatactcgcccttgatgtgcacggtcgcacctttgatgccagcgacttcaccggccgacagttccatgatggttgcgtcgaaaccgcgtttgtccgcccagcgcaggtacatgcgcaacaggatgttggcccagtcctgggcttcggtgccgccggaaccggcctggatgtccaggtaggcgttgttcgggtccatttcatggctgaacatgcggcggaattcgagtttggcgaggttttcctcaagacgggccagctcggcgacgacatcgcccactgcgccttcgtcattttcttcgacggccatgtccagcaggtcacggcaatcgcccagaccggtgttcagttcgtcgagggtatcgacgatctgtgccagcgcagcgcgctcgcggcccagttcctgggcgtattcaggtttgttccagacagccggatcttcaagctcgcgattgacttcggtcagacgctcatgcttttgatcgtagtcaaagatacccccgaatagtttcggagcgctcggacaggtccttgatggtgttaaggatcgggttgatttccatggcgggcagcactcgttggcgaacttttgaaagccgacgagtataacgacaaaccgggtggaacggcagcccgcttggcgaaaaggcggtttttgtagacgatctataagacgatagagatcaaatgtgggagctggcttgcctgcgatggcggtgtgtcagctaacagatctgtctctgatagaccgctatcgcaggcaagccaactcccacagggattttgaggtgggttggctactcaatccccacctgattacgcccattgtgcttggccgtatacaaacccttgtccgccgccatgatcaactgccggcaatccgtgccctgcaccggcgtcatggtcgacaggccgatgctgatggtcaggcttgcaccttcggcaggggcgatgtgcgggattttcagcgcggccaccgccatgcgcagcttttctgccaccaggcgggcaccgcccggtgaggtgttcggcagcaccagcgcgaactcttcaccgccgtaacgcgccggcaagtccgaggggcggctgctggcttcacggatggtcgcggccaccttgcgcagggcttcgtcgccttcgacgtggccgaagctgtcgttgtaggtcttgaagaagtccacgtcgatcatcagcaacgacagctgggtctggtcacgcatggcacggcgccactccagttccaggtactcatcgaagtgccggcggttggacagcccggtcaggccatcagagttcatcaggcgctgaagcaccaggttggtgtccagcaactgctgctggctcacgcgcagcgcgcgatacgccgcgtcccgctggatcagggtcatgtaggagcgcgagtgatagcgaatgcgcgccaccagctcgatgttgtccggcagcttgaccaggtaatcgttggcccccgccgaaaacgctgcgctcttgatcagagggtcttccttggtcgacagcacaatgatcgggatattcgccgtggccgggtggttgcggtattcgcgcaccagggtcaggccatcgaggcccggcatgaccaagtcttgcaggatcaccgtcggtttgatgcggatcgcctgggcaatggcctggtgcgggtccgcgcaaaaatggaagtcgatgttttcttcatgggccaggccgcggcgtaccgcctcgccgatcatggcctggtcatcgaccagcaacaccatggcggcgttttcgtcggtcttgatgtcgtcgatctgtaaatcattcatgtgcagtcacctgaattactttcctgcaaaccagcacagcgggaggtcttgatcattttgcaaaaacctccagcaatcggggcgcaattctgtccagtgggcgaatttcaacagcagcatcaattgctgccgccgctttgggcatgccatacaccgccgagctctgctgatcctgggcgatggtcaaatatccttgttcacgcaacaacttgaggccctgggccccgtctcgccccatgccggtcagcaatacaccaacggcgtcaccgttccagtggctggccacgctctcgaaaaacacgtcgatcgaaggccggtagatctcgttcactggctctgctgtataggctagcgtgccgtttttcaacaggcgaatgtggtggttggtgcccgccagcaataccacgccactttgtggcggctcgccttcgcgggccaggcgcaccggcaacgcggaggcactgctcagccactcggccataccggcggcaaacacctggtcaacatgctgcaccagcacgatggcggcgggaaagtcccgtggcaagcctttgagcagggtttccagcgctgccggccctccggccgacgaaccgatcgccaccaggctctggcgcttgccggtgatgcgtggcggcgcggtttcggcgcgtacgcggctgccccgctggccgatcagccagccaatattgaggatcttgcgcaacaatggcgccgccgcatccttggggttgcccacgccgagcgccggggtatccaccacatccagggcgccatggcccatggcctcgaacacacggctgacgttggcctggcggtccacggtgacgatcacgatcgggcacggtgtatcagccatgatctgccgcgtggcttccacgccgtccatcaccggcatgatcaagtccatcaaaatcaggtccggggtcagttcggcgcaacgctgcacggcttccagaccattgttcgccacccagaccacctcgtgcgcgggctcgaaactcagggcacggcgcaaggcctctaccgccaggggcatgtcattgacgatcgcaatcctcatgcccgggctcctccaatcagttcgaccacggcgtccagcaaggcatcatcgtggaaactggccttggctaaataatagtcggcgccagcatcaaggccacggcgccggtcttcttcacggtccttgtacgacaccaccatcaccggcaacgattgcaggcggctatcacggcgcaagagtgtgaccaattcgatcccgtccatacgaggcatatcaatgtcagtgatgagcaggtcaaagtcttcggagcgcaaggcgttccagccatccatgccatcgaccgcaaccgccacttcataaccacggtttagtaacaatttgcgttgaagctcacgcacggtgagcgagtcgtccaccaccagcacgcgcttgcgcggcgcttcagtggcttgctggctgcgccgggcaatgcgctccaggcgcccggtgttgagcaatttatccaccgaacgcagcatgtcttcgacatcgacgatcaacaccaccgaaccgtcatcgagcaaggctccggctgaaatgtcctggaccttgcccaagcggttatccaacggcaataccaccagggtgcgctcgccgatgaaacgctccaccgcgatgccatacaccgcatcgcgttcgcggatcaccacgactttcagcgtgtccgcattgccctgccccggcgggcgctgcaacagctggttggcggccaccaggccaacgtgccggccctcgtgccagaaatgctgacggccttccagttgcacgatgtcgtccggcgacaggtcgcacatgcgctcgatatgcgccagcgggaacgcgtaggcctcctcgccgacttccaccaccaggctgcgtaccaccgacaacgtcagcggcacttccagatgaaaacggctgccctgccccgctgtctgctccagcaccacggcaccacgcaactggcgcaccatatgctgcaccgcatccaggccaacgccgcgcccggacacttcggtcaccttgtcgcgcaggctgaaacccggcaggaacaggaacgtcagcagttcctcctcgctcaggcgcagcgcagtctccagcggcgagaggtggcggtcgacgatggtgccgcgcaggcgctccagatcgacaccattgccgtcgtcactcaactccagcaccagcaaaccggcttgatgggacgcgcgcaggcggatcacgccttcggccggcttgcccgccaaaatgcgctgttcgggcatttcgatgccgtggtcgacggcattgcgcagcagatgggtcagcggcgcttcgagtttttccagtacgtcgcggtccacctgggtcttttcgccctcgatttccaggcgcacctgcttgcccaggctgcggccgaggtcgcgcaccatgcgcacttgcccggccagcacatcggcaaacgggcgcatgcggcaggccaacgcggtgtcatagagcacctgggcgcgctgcccggcctgccagccgaactcgtccagctcggcggttttctccgccagcaacgcctgggcctcgctcaacaggcggcgtgtgtcggccaaggcttcctgggcttcgaggttcaaatccagggccttgagctggccgtccaacgcgtccagggcacgcgcactgttgctttgaatgcgcttgaggcgctgcatgctggccaggtaaggcttgagccgctgggtttccaccaaagatttgctcgacagatcgagcaggctgttcaagcgctcggcggtcacgcgcagcacgcgctcgccgccctcggtcatgggtttgctctggcgcggcggcgaagcggcgaccggcggcgcgggctcaggttccggcgccagtgcctcgatcaccggagctggctggggggcgggctcgggcggcggcacaacttttttaaccggtgcctgggacgggtcgagcaaacgctccatcagcgccacataggcttcgatgtccgccgggcccacgtcattgccgggtgtggcgatgcgcatcagcaggtcagtgccttgcagcagcgcatcgatatgttcgggttgcaggtacagacggccttcctgggcgctgaccaggcaatcctccatgacgtgcgacacgctgacgcccgcgtccacgccgacaatccgcgccgcccccttgagcgagtgcgccgcgcgcatgcaggcttcgagctggtcggcctgagtcgggttgcgctccagggccagcaaaccggcgctcagcacctgggtttgcgcatcggcttccaggctgaacagttccagcagcgaggcatcgcgcatctggtcgggggtcatgtgaggctccgggtcacggcggacaacaattgcgcctcgtccagccaacgcaggctgcggcctttccactgcaatacgccctgggtgtagcgcgcgctggcctgggtgccggaggccgacgcagccttcaggacgcgttcgtcaatcgcatgaatgccgtccacttcatccaccggcaccaccaccgggccgtcctgggcggcaatgatcagcatgcgcggcatgatccgcccgccgctcacaccattgccggtgctgtccaggccgagcaattccaccagcgacaggcatgccaccagcgcgccgcgcacattggccacgccgagcagtgcccgggaacgctggtgcggcagcgaatgaatcggctgcaacggcgccacttccaccaggcagcgggtggcgatgcccagccattcttcgccgaggcggaacatcagcagcgagcgggtgaccacatccgaatccacgtcggcctgcgcctgcgggcgacggtcgtcctgctgcaaggcatagcggtcgagcaagcgcgtggcggcggcggaatacaccgagcaattacggcaatggatatggtccaccagcagcgggcaggacttgtcgccatggatgccgatgcggttccagcaatcgtcgatggcttgggtatcggccagggtcaggtccaggcctgcggtgtcgagcgcgtcggggctactcatcgtttgggctcactgtcagctcgctcgctacgggcggcgcgtgcttgcaaacggcgcgcccccgcactgtcgccctgggattccagcaacgcggccaagtgcatcaaggcctgcgggtgctggggttccaggtacaaggcttttcgataatacccctgggcttccagggcactgccggccacatcgctgagcagccccagccagtaaaacacctgggcggccggcgggtggttactcaaatactgttcacaggcggcacgcgcctcggcacttttaccctcgttggccagggtggcgatccggctgagcaggtcgcccgcgtcggattgcgcagccttgatcggcaccacctgggctcgcgcggtgctgaacgggcgcggcttgggcgggatcggcgcggcactgcgctggggcaatggcgccggcatcggcacaaacgccggctgcggagtgaccggctctacatgccggctgaacgcaaaggattgcggcacgccgatcgagcgcatgccatggcggccgagcaagctgccctcggcggggccgataaacagcacgccgtccacgtgggtcaggcccttgagcacatcgaagacttgtttctgggtcggttggtcgaagtagatcaacaggttgcgacagaacacgaaatcgtaggtcggctcattcgccagcagcgccgggtccagcaggttgccgacttgcaggcgtacctgatcgcgcacccggtcgtcgatgcgataaccgtccggttgctcggtgaaatgatggtcgcgaaacccgatatccgcaccgcgaaacgaattcctgccgtacacaccacggcgcgcgcggtccaccgacagcgggctgacgtccatgccctgcaccttgaactgatgcggggccaagcctgcgtcaagcaaggccatggcgatcgaatagggttcttcgccggtggaacacggcaggctcaagatgcgcaacgcgcgcatctgcttgatctcggccaggcgcgccttggccaggcgggccagggtcgcaaaggattcggggtaacggaaaaaccaggtttcaggcacgatcaccgcttcgatcagcgcttgctgctcgtcttgggcgctttgcaggcgctgccagtaatcttccagcgtttgtgcgtgtacggcctggctgcgctggcgcacagcacggtcgatgatcgcctcgcccaccgaggcgacatccaggccgatgcgctctttcagaaaggccgagaagcgcgggtcgctgctcataggctcagctcggcgctaaacagcaaagtacgcacatcttccgtcaacaggtcatccacgccaatccactgcatcaggcccgccgcgtcttcacgcaccggccccaggtaaggcgcttcgcgattgtccaggccatagggctgaaactcggcagggtcgcaacgcagggtgtcggtggcttgctccaggatcagccccagccagcgcgcttcgacccacggctgcggctggtaattgaccagcaccagccgcgtgctggtacgggcctgggcggcggcgccgaaggtcagggcactcaggtcgacgaccggcaccagcacgccccggtgcgcaaagatacccgccacccacaccggcgcatgggcgatgggtttgagcggcaggcgcggcagcacctcggccacttccgtggccttgagggcataccgttcgctgccgatatgaaacaccagaaacagcgcttttttggccgccgggacggcgccgcgtttagccgcgaggtcgctcatcagactttgaaacgcgacacgccgctgcgcagaccgaccgcaacctggctcagttcatcaatggcaaagctggcctggcgcagggattccacggtctggctgctggcatcgcccaattgcaccagcgcgtggttgatctgctcggcgccggtggcctgggcctgcatgccttcgttgaccatcaacacccgcggcgccagcgcctgaacctgatggatgatctgcgacagctgctcgccgacttgctgcacctcggacatgccgcggcgcacttcttcggagaacttgtccatgcccatcacacccgccgacaccgccgactgaatctcgcgcaccatctgctcgatgtcgtaggtggccacggcggtctggtctgccaagcggcgcacttcggtggccaccacggcaaagccgcgaccgtattcaccggctttctcggcctcaatggcagcgttaagcgacaacaggttggtctggtcggcgaccttgacgatggtcaccaccacttggttgatgttgccggccttctcattgaggatcgccagcttggcgttgaccaggtcagcggcgcccattaccgagtgcatggtttcttccatccgcgccaggccttgctggccggaaccggcggccaccgaggcctgatcggcggcggtggacacttcggtcatggtgcggaccaagtccttggacgtggcggcgatctcgcgggaagtggcaccgatttcagtggtggtggctgccgtttcagtggccgtggcctgttgctgcttggaggtggcggcaatctcggtgaccgaggtggtcacctgcaccgaggagcgctgggcctgggacaccagggcggtcagctcggtcatcatgtcgttgaagccggtttccaccgcgttgaattcgtccttgcgctccaggttcaagcgcttgctcaagtcaccgtcacgcatggtgcccaggatcgaaacgatgcgctgcatcggtgccatgatggcgcgcatcagcagcagcccgcacagcccggcggcgaggatggccagggccaacgacacaaacatgctgactttggcggcggcgactgcgtcatcgatggccgtggtggcgcggtcggcgacgtccttgttttcagtgatgatgtcgttgagtttcatccgccctgccgtccaggcgggcgtcagggtggtcgtgaactctttgcgcgcggcagccagatcattgcgttgcaggctgtcgagtacggtagccaggctcttgttgtaggcctggtgcagggtttcgaatctgtcgaactccgcttggtcgtcgcgaccattgacggttttctggtagttggccatctgctgctgaatacgcgcctcgaacgacttgaagtcggccttgtcggcgtcagtcaagcccttgtcgtcgcgcaagcccagcaattccagggtttgcaggtaactgtcgacccaggcgctacggatcatcgaactgagataaacccccggcaccgcgtcatcacggaccgcctcttcgctgacctcgatcttcagcaaccgcgaataagagaccacaaccattaacagcatgatggcgataatgaccgcaaagctagccaagatccgttggcgcaaggtccagttcttcacagtatttcctcgaagggccgatcaaatgccgacgagtatagctgagcagaagccctcatttatcaacgggttttgatgtagcgctcacagaatgcaaaaacacccgaatgtgtgggagctgaccagtgtgggagctggcttgcctgcgatagcctcactgcggtgtgactgaaacacctaggcgcttgtatcgcaggcaagccagctcccacactagccagcgtccctcattgggatcggtgtcaggtctacagttactggttcaggcgcacctgtttttccagctcggtcttgaggccgggctcaagtttcagctggcgtgccagctcgtccagatacgccttttccatgaagttctcttcgtccaccagcatcacgctggcgatgtacatctcggccgccatttccggggtgcccgccgcgcgggcgacatcggcggggtcgaggggtttgttgagctcggcatgcagccagctttgcaactcgcggtcgttgtcgagcttggtgaattcaccttcgatcagcgcgcgttcgcgttcgtccacatgcccgtcagctttggcggcggccaccaacgccttgaggatgccctggctgtgctgctcaacctgggccggtggcaggcgatcaatggtttgcggctcgccttggggcgcattggcctgttgcgactgccagttgccgtaggccttgtaggcaatgacccccagcgcggccaacccgccatacgtcagggccttgccaccgaacttgcgggctttcttgttacccagcaacagccccatggcacccgccgcgagcgccccgccaccggcaccgccgagcagactgccgagcccgccgccaccgagcagaccgccgagggcccccttatcgtcctgcttgtgttggccaccggctttcttttgcagcatgtcctggccagatttgagcaactgatcgagcaatccacgggtattcattcgcagcctccaggcacttgggttcattggagcaataggcacccagcgtaaaaccaagtgccaaaaagccgcgatatagagtgcttccagatgtaacgccgatgcccttcacttaaatcgatatacactcgggtaaatctataaaaacaccccactggtaattccagcatgatgaccctgcgtcaaatccggcattttatcgccgtggccgagaccggctcgatctctgccgccgcgcagaccgcgttcatttcccaatcgaccctgaccctggcgatccagcaactggaacaggaaatcggcgtcactctgttcaaccgccacgccaagggcatgaccctgacccaccagggccaccagttcctgcgccaggcgcacttgatcctcgccaccgtcgacaatgccaaacgcagcctgcaacagagcaccgaccaggtggccggacaactgattatcggtgtgacgagcctggttgccggctattacctcgccgacctgctcacccgctttcagcgcgcctaccccaacgtggaaattcgcgtgatggaagacgagcgcccgtacatcgagcatttgctggtcagcggcgaaatcgacgtaggggtgttgattctttccaacctcgaagaccgccacgccctgcaaaccgaagtgctgacccactcgccccaccgcttgtggttgccggcgcaacacccgttgctggaacacgacagcatcaacctcgccgacgtcgcccgcgagccgctgattcaactcaatgtggatgaaatgggccacaacgcccaacgcatgtggaccggcgcaggcctgcaaccccgggtcacgttgcgcacagcgtcaacggaagccgtgcgtagcctggtggccgcaggccttggcgtgtcgatacaacctgacatgacttaccggccttggtcgctggaaggcgacattatcgaagcgcgaccgattgccgacctcagccaaaccctcgacgtcggcctggcctggcgccgtggcaccgcgcgcccggcactggtggacccgttcctgacggtggcccgcgaacagccgcacccacgcaagccatctatttaatcgaatgctgctttcagtatttagtatttgttgacctcgcgcctgacctctagtctttctgcatccataagagaaggtcaggcgcctcgcaagagaacgcccatggccctacaagaaaagagatcgcgaaaaatgtccggcgcgcccaccccgctgcttaccgcgttgctgatcgacggcgaactggtccagggccaggggtttgccgagcccatcgtcaatcccgccaccggcgaagtcctcacccagatcgccgaagccagcaccgagcaagtcgagaccgccattctggctgcccaccgcgcctttgccggctggtctcgcactaccccgcagcaacgctcgaacattctgctgggcatcgccgatgccatcgaaaaacaagccgactatttagcccgcctcgaatccctgaactgcggcaagccgttgcacttggcgcgtcaggacgatttgagtgccaccgtggatgtattccgcttttttgccggcgccgtgcgttgccagaccgggcaactgagcggcgaatacctgccgggctacaccagcatggtgcggcgcgacccgattggcgtggtagcgtccatcgcgccgtggaattacccgctgatgatggccgcgtggaagatcgcgccggcgctcgccgctggcaacacactggtgttcaagccctcggagcacacgccgctgtcgatcctcgccctcgcgcccgcgctcaacgcgctgctgccgcgcggggtgatcaacattctgtgtggcggcggggaaggcgtcggcgcccatctggtcagccatgccaaagtgcgtatggtttcgctgaccggcgacatcgtcaccgggcaaaaaatcctccaagccgcgtcgaaaaccctcaagcgcacgcacctggagctgggcggcaaggcgccggtgatcgtgtgcaacgacgccgacctgcaagccgtggtcgagggcgtgcgcacgtacggctactacaacgccgggcaggattgcacggccgcctgccgtatttacgcgcaagccggcattcacgacaagctggtcgccgaactgggtgccgccgtcagcagcttgcgcttcgccggcaagcgcgatgccgacaacgaactcggcccgctgatcagcacgcgccagcgtgatcgcgtcgccagttttgtcgagcgcgccctcggccagccgcatatcgaacgcatcaccggcgccgccgtgcactccggcgcgggcttctattaccagccgaccctgcttgccggttgcaagcagaacgatgaaatcgtgcagcgcgaagtgtttggcccggtcgtcaccgtgacccgtttcgatgaactggaacaggcggtggactgggccaacgactccgaatacggcctagcctcgtcggtgtggacgcaaaacctggacaaggccatgcaggtcgccgcgcgcctgcaatacggctgcacctggatcaacagccatttcatgctggtcagcgaaatgccccacggcggcttgaagcgctcgggctatgggaaagacctgtccagcgattcactgcaggactacagcgtggtgcggcacatcatggcccgccacagccagcacctttaaaacaacaactaagctattgcgacaccggctgcacacactgccccgaccataattaaagaagagggaacccccatgtccgcgcacaagaccgcactgctcagtgccctgaccaccgcgctgctggccagcgccagcctgcaggccgccgaaccgctcaaggcggtcggtgccggtgaaggccagctggatatcgtcgcctggcccggctacatcgaacgtggcgaaagcgacaaggcctacgactgggtcagcggtttcgagaaagaaaccggctgcaaggtcaatgtgaaaaccgccgccacctctgacgaaatggtcagcctgatggccaaggggggttatgacctggtcaccgcctcgggcgacgcttcgctgcgcctgatcggcggcaaacgcgtgcagccgatcaacaccgcattgatccccaactggaagaacatcgacccgcgcctcaaggatgcgccgtggtatgtcgtcggccagcaaacctacggcacgccgtaccagtggggcccgaacgtgttgatgtacaacaccaacgtgttcaagaccgcgcctaccagctggaatgtgctgtttgaagcacagaacctgccggacggcaagccgaacaagggccgcgtgcaggcctatgacggcccgatctacattgccgatgcggcgttgtatctcaaatcgaccaagccggaactgggcatccagagcccgtacgaactcaacgaaacccagtacaaggccgtactcgacctgttgcgcgcccagcaaccgttgatccaccgctattggcacgacaccaccgtgcagatgagcgacttcaaaaacgaaggcgtagtggcgtccagcgcctggccgtatcaggtcaacggcctggtcaacgagaagcagccgattgcctcgaccattccaaaagaaggtgccaccggctgggccgacaccaccatgttgcacagcgaggccaagcacccgaactgcgcgtacaagtggatggattggtcgttgcagcccaaggttcagggcgacgttgccgcctggttcggttcgctgccggcggtacctgcggcgtgtaaagagagcgaactgctcggcgccgaaggttgcaagaccaacggcttcgaccagttcgacaagatcgccttctggaaaaccccgcaggcagaaggcggcaagttcgtgccctacagccgctggacccaggattacatagcgatcatgggcggccgctaagctcccccgggccacatggatccagtgtgggcagggtttgtgtgggagctgacttgcctgcgatgcagccccctcggtgcttcagccagaccgaggtgatgccatcgcgggcaagcccggctcccacagaaaagcgcccaccgttcaatggcgatcacagatttccgttttttcagaagtccaggccgggccgctgcgacgacccgcgccttttcggagcaccgcaccatgacgcttgcagtccaattcacccacgtttcccgtcagttcggcgaagtgaaagccgttgaccgggtttccatcgatatccaggacggcgagttcttttccatgctcggcccttccggctccggcaagaccacgtgcctgcgcctgattgccggtttcgagcagccgagcgcaggctcgatccgtattcatggcgaggaagccgcaggcttgccgccgtaccagcgcgacgtgaacaccgtgttccaggattacgcgctgttcccccatatgaacgtgcgcgacaacgtcgcctatggcctcaaggtcaagggcgtcggcaaggccgagcgcctgaaccgcgccgaagaagccttgggcatggttgccctcggcggctacggcgagcgcaagccggtgcaactctctggcgggcagcgtcaacggggggccctggcgcgtgcgctggtcaatcgcccgcgcgtcttgctgctcgacgaacctctaggcgccctcgacttgaagctgcgcgagcaaatgcaaagcgagctgaaaaagctgcaacgccagctcggcatcacctttatcttcgtgacccacgaccagaccgaagcgctgtcgatgtccgaccgcgtggcggtgttcaacaagggccgcatcgaacaggtagacacaccgcgcaatctctacatgaaacccgcgacggcgtttgtcgccgagttcgtcggcacctccaacgtgcttcgcggcgagctggcccaacgcctcagcggcagcgcgcagcccttctcgatccgcccggaacacgtgcgtttcgccgaaggcccgctggcggccggcgaagtggaagtcagcggcctgctgcacgacatccagtaccagggcagcgccacgcgctatgaactgaaactggagaacggccaggcgctgaacatcagccaggccaacaaccagtggctggacatcagcagcggccatcaggtcggccagcccgtcaccgcccgttgggcgcgggaagccatgaccccgctggccgacatcacaggcgaggtgtgagatgagcctggccctttcccaaccgccgatgcgcaggttttccaacctgctgtatcgcaagcccaacctctatctggcgatgttgctgataccgccattgatttggttcggcgccatttatctcggctcgctgctgaccctgctgtggcagggtttctacaccttcgatgacttcaccatggcggtcacgccggacctgaccctggccaatttcgccgcgctgttccagccgtcgaacttcgacatcatcctgcgcaccctgagcatggcgatcgtggtgtcgatcgccagcgccgtggtcgccttcccgattgcctactacatggcgcgctacaccacgggcaagaccaaggcgtttttctacatcgcggtgatgatgccgatgtgggccagctacatcgtcaaggcctatgcctggaccttgctgctggccaaaggcggcgtggcgcaatggttcgtgcagcacctggggctggagccagtgttgcagttcgtgctgggcattcccggcgtgggcggcagtaccttgagcacctcgcacctggggcggttcatggtgtttgtctatatctggctgcccttcatgattttgccgatccaggcctcgctcgagcgtttgccgccgtcattgctgcaagcctcggcagacctcggcgccaagcctcgccagaccttcatgcaggtgattttgccgctgtcggtgccggggattgcggccggttcaatcttcacgttctcgctgactttgggcgacttcatcgtgccgcaactggtgggcccgccgggttacttcgtcggcggcatggtctacgcccagcaaggtgccatcggcaatatgcccatggcggcggcgttcacgctggtgccgatcgtgctgatcgcggtttacctctccatcgtcaaacgcctgggggccttcgatgcactctgagaaatcttctatcgggctgaagatcgcagcctggggcgggttagtgtttttgcactttccgatcctgatcatcttcctctacgccttcaacaccgaagaagccgcgttcagctttccaccccagggcttcaccctgaagtggttcagcgtggcttttgcccggccggacgtactggacgcgatcaagctgtcgctgcagatcgcggccatcgccacgctgattgccatggtgctcggcacgctggcctcggcggcgttgtatcgccgtgagttcttcggcaagcagggcgtgtcgctgatgttgatcctgccgattgcgttgccggggatcatcaccggtatcgccttgctggcgaccttcaagacgctgggcattgagccggggatgttcaccatcattgtcggccacgcaaccttttgcgtggtgatcgtctacaacaacgtcatcgcgcggttgcgccgcacgtcccacagcctgatcgaggcctcgatggacctgggcgccgacggctggcaaaccttccgctacatcatcatgcccaacctcggctcggcgttactggcgggcggcatgctggcgtttgcgctgtcgttcgacgaaatcatcgtcaccactttcaccgccgggcatgagcgcaccttgccgctgtggctgctcaatcaactgagccgcccacgggacgtaccggtgaccaacgtggtggcgatgctggtgatgctggtgacgatgttcccgattctgggtgcctattacctgacgcgcggcggtgaaagcgtggccgggagtggcggtaaataacctcccacagttgaaccgggtttcttcagggagataacaatagttttgtggaggactgaaccatgcaaaccaaattactgatcaacggccacctggtcgaaggcgaaggcccggcccaggccatattcaacccgtcactcggccgcgtgctggtggaaatcaaagaggccagcgaagcccaggtcgacgccgccgtacgcgctgccgatgcggcgtttgaaggctggtcgcaaaccgcgcccaaggatcgttccctgctgctgctcaaactggcagacgtgatcgaagcccacggcgaagagctggcaaagcttgaatcggacaactgcggcaaaccctacagcgccgcgctgaacgacgagattccggcgattgccgacgtgttccgcttcttcgccggcgccagccgttgcatgagcgggtcggccggtggcgagtacctgcccggccacacctcaatgatccgccgtgatccggtcggcgtgatcgcctccatcgcgccgtggaactacccgctgatgatggtcgcctggaaaatcgccccggccctcgcggccgggaataccgtggtgctcaagccgtcggagcaaaccccgctgaccgcgttgcgcctggtcgagctggccgctgaaattttcccggccggtgtactcaacctggtgtttggccgtgggcccaccgtgggcagcccgctggtgaaccatccgaaagtgcgcatggtgtcgctgaccgggtccatcgccacgggcgcgaacatcatttccagcaccgctgacagcgtgaagcgcatgcacatggagttgggtggcaaggcgccggtgattatcttcaacgacacggacattgctgctgccgtggagggcattcgcacgttcggtttctacaacgccgggcaggactgcaccgccgcctgccgcatttatgcccaggcaggcatctatgacgcgtttgttgaaaagctcggcgcagcggtcgccagcatccaatacggcttgcaggatgatccggccaccgagctgggcccgttgattaccgcgcagcaccgcgaccgcgtggccgggtttgtcgaacgcgccgtggcgcagccgcatatccgcctggtaacgggcggcaaggcggtggaaggcaacggctacttcttcgaacctaccgtattggccgacgcgcagcaggacgacgaaatcgtgcgccgcgaagtgttcgggccggtggtgtcggtgaccaagttcaacgacgaggcgcaggtactcggctgggccaatgattcggactacggcctggcgtcatccgtctggaccgctgacgtgggacgcgctcaccgcctcgccgctcgcttgcagtacggctgcacctgggtaaacacccacttcatgctcgtcagcgaaatgccccacggcggccagaaattgtcggggtatggcaaggacatgtccatgtacgggctggaggactacaccaccgtgcggcacgtgatgttcaaacactgacgctttacccctgtgggagcgggcttgcccgcgatggcaatgtggctgtgccgacgctatcgcgagcaagcccgctcccacatgggatcttcataattctcgactaccgtgtgcacagactcggaaatgtcttgtcgcacttgcaaagccatcacctcgctatcaatcatttttcctacaccatcgaaccgcttaagctatccggcgtctgtttattgtccgttgcgtttggccgaaggcatgtccgaaccgttatttctgatccgctacgtgccaggaagggcgcgggatttgctcacgacaggttgtctctatgcaccgcaggaatttgctcaaagcgtccatggccattgcggcctacaccggtttatcggccagcggcctgctcgctgcgcaagcctgggccggcaaccgtgccgccgacggcaaggccgttgcatttgattttgaatcgctcaaaacccaggccaagcaactcgccggggcggcttaccaagacaccaaacaagtgctgccgacgactctggcgaccatgaccccgcaaaatttcaacgccatcggctacgacggcaaccattcgctgtggaaggagctgaacggccagctcgacgtgcaatttttccacgtcggcatgggtttcaagacgccggtacgcatgcacagcgtcgaccccaagacccgagaggcgcgcgaagtgcattttcgcccttcgctgttcaactacgcaaaaaccaccgtggacaccaaacagctgaccggtgatttagggttctcgggcttcaagctgttcaaggcccccgagctggaccgccatgatgtgctgtcgtttctcggcgccagctactttcgcgcagtggattcgaccggccagtacggcctctccgcccgaggcttggccatcgacacctacgcgaaaaaacgcgaggagttccccgacttcacgcagttctggttcgaaaccccggacaaggacgccacgcgctttgtggtctacgccctgctcgactcgccgagcgccaccggtgcctaccgcttcgatatcgactgccaggccaaccaggtggtgatggccatcgacgcccatatcaatgcgcgtaccaccattgaacaattgggcatcgcgccgatgaccagcatgttcagttgcggcacccacgagcgccggatgtgcgacaccatccacccgcaaatccacgactcggaccgcctggccatgtggcgtggcaacggcgagtggatctgccgcccgctgaacaacccggccaaattgcaattcaacgcgtttgccgacaaagacccgaaaggttttggcctggtgcagaccgaccatgaattcgccagttaccaggacaccgtggactggtacagcaaacgcccaagcctgtgggtcgaaccgaccacggcctggggtgaaggctcgatcgacctgctggaaatccccaccaccggcgaaaccctcgacaacatcgtggccttctggaccccgaaaaagccggtggctgccggcgattcgctgaattacggctacaagctgtactggagcgccctgccgcccgtgagtacaccactggcccaagtcgacgcgacccgctcaggcatgggcggcttcaccgaaggctgggcaccgggtgagcactacccgcaagtctgggcgcgccgttttgccgtggacttcaagggcggcggcctcgaccgcctgccggccggtaccgggattgaaccggtagtgacctgctcccacggtgaagtgaaggatttcagcgtactggtgctcgacaacatcaagggctaccgcatcctgttcgactggtacccgaccagcgacagcgtggagccggtggagctgcgcctgtttatccgcacgcaggaccgcaccttgagtgaaacctggctgtaccagtacttcccgccagcgccagatcaacgcaagtacacctgattcctcggcagaacgaaggccgtgtgggagctggcttgcctgcgatgcaagcacctcggtatatgagatacaccgcagtgatgccatcgcagcggtgcggcgatccgacaagccagctcccaccgtgttgtcaggtgggctttagaaccgcgacacactcttcatcgccccaatcagataccgcatcgccacctgatcgttttcggtcagggcgcggtactgctccagcaattgcgcctcatccgaactcagcttccggccacgcaagcacaccctgcgggtcagaaaagacatcaccacacccgcaacaccataggacttggccatggactgtttctcctgatatcgatctcaaactccttgtgcccatcacctgccttgcgtgaagtgcaaggcctccccggataaacaggctgactccctgggccagaaatcagacttaccctaagcgtagaaacaatctgctgacgtgtgggatttttttagagtattcacttaaaaaactgtcgaggtaacaaagacctacaggcctttctcacgcaatggccggtacaggtgaatgtcatgcggttcctgcgcaaacagctcggggtcgggttgctgcaacaacaaacaaccgtgacgccggtagaaatccacggtattgcgcgattcggtggcagacacatacagcgcatcgacacccacttcccggccatgctcacaggccagcgcaaacagccgaccacccagccccctgccacgcacagagtggctgacgtgcaggaacttcaactgccgcaggttcaggttctggttacgaatcggacggttgtccaccaccacggccgccactaacgccgcgccatcgaacacgccccacagccagccgccgcgtttgaggcaagcgcgcagcgccacggcatcctgctcggcctcgccttccggccagccgcgcatgtcgtggaagtcggcgtacagcaccagctcgccgttttccaggcgatagcattcatgaaccaattccgtgcggtcgatgcttgccagcaacgggatatcgctttcgtttaacgctcgctccaccagcatgatggcctcctgcttttgagcggcaagcatcagggttgcgttaaacgcaggcaagaaaaaacccaccgggtgagggtgggtttctgcgacggctgtgggatcaatccctcagatcagactcatggatcggctggtcacggtgggtcgcccgttgatattgcgccggccaaatggctttacgcccgcccagatcgtcatcagcatgcagcggccaataggggtcacgcagcagttcacgggcgaggaaaatgatgtccgcctggcaggtgcgcaaaatgtgctcggcctgggccggctcggtgatcatgccgacggtgccggtggcgatgcccgactctttgcgcacccgctcggcaaaacgcgtctggtagccagggccgacgggaatctcggcattggcggcggtgccgcccgaggacacgtcgatcaggtccacgcccaagcccttcaggcgccgcgccagctctacggtttcatcggggttccagccgtcttccacccaatccgtggccgagacccgcacaaacagcggcagctcctgcggccagacttcgcgcacggccttcgtcacctccagcaccaggcggatgcggttttcaaaggagccgccatactggtcctggcgctggttgctgatgggcgagaggaactggtgcagcagataaccgtgggcggcgtggatttccaccacttcgaaaccggcagtcaaggcgcgcttggcggcggcgacaaaatcactgatcagctggcggatttgcccttcatccagttgcttgggctgagtgtggttggggtcaaacgcaatcggcgatggccccaccggcacccaaccgccctcttgcggtttgacgctgccgtgttggccgatccacggccgatgagtgctcgccttgcgcccggcgtgggctagttgaatccccgccaccgcaccttgcgcagcaataaagcgtgtgatgcgttgcagtggctcgatttgttcatccttccacaaccccaggtcctgggcggtgatgcggccatcggcagtcacggcggtggcttcagtgaagatcagcccggcgccccccacggcgcggctgccgaggtgcaccaggtgccagtcattggccagcccgtccttggccgagtattggcacattggcgatacggcaatgcggttgagcagggtcaattggcgcagggtatagggttcgagcagctgactcatggcgcacctcttctgggttctatgggcactcaacggtgcttagagcctagtcgacaacgcgcgattgcacagggttcagaatggaatacgggagccgcttgccggctcccgtgtcttggccgcttacatttcgacctgggtgcccagctcgatcacgcggttgactggcagcttgaaaaaacgcaggttgccgttggcgtttttcaacatgaaggcaaacagcgcttcacgccagcgcgccatgcccttgatgcgcgaagcaatcacagtttcgcggctgaggaagtaggtggtgcgcatcgggctgaaatccagatcgtccagatggcacaacttcagggcttcgggcacatccggctcgtcggcaaaaccgaagtgcaggatcacccggaagaagccttcgccataggaatccacctcgaaacgccgtgtaaccggcacacggggtatgtcctcgtagaccaccgtcaacaacaccacttgctcatgcaacacctggttatgcagcaggttgtgcaacagcgcgtgaggcacggcgtcgggccgcgcggtcagaaacaccgccgtgccctgcacgcgatgcggaggctgcacgcggatactgccgataaagatcggcagcggcaggccgccttcgtcgaggcggtctaccaagagttgcttgccgcgcttccaggtggtcatcagcacgaacagcacgatccccgcgagcaccgggaaagcaccgccctggatgattttcggcacgttggccgcaaagtacaggccgtccaccaacaggcagcagaccagcaccggcaccgccaggattggtggccatttccacagcagcaacatcaccgccgacaccaggatggtggtcatcagcatggtgccggtcaccgccacgccgtaggccgaggccaaggcgttggaggactcgaagcccagcaccagcaggatcacgccgaccatcagcgaccagttcaccgcgccaatgtaaatctggccttgctcggcgctggaggtgtgctgaatgtgcatgcgcgggatgtaacccagctggatcgcttggcgcgtcaacgagaacgcgccggaaatcactgcctgggacgcaatcaccgtagccagggtggacaacaccaccagcgggatcagcgcccagctcggcgccagcaggtagaacgggttgcgcgcggcttccgggtcgcccaacagcatggcgccttgaccgaagtagttgagcaccagcgccggcagcaccaggatgaaccaggcgcgggcaatcggcttgcggccgaagtggcccatatctgcgtacagcgcttcggcgccggtcaaggccagcaccaccgcgccaaggatcgccaggccaatgcccgggtggctctggaagaaacgcacgccccacatcgggttcagcgcgctgagcacttcagggtgcagggtgatgccatacacaccgaggccgcccagcaccaggaaccaggtgaccatcaccggcccgaacagcttgccgatgcggtcggtgccgtgtttctggatcaggaacagtgccaccagcaccaccagggcaatcggcaccacccatttttccaggccgtcgaacgccagctccaaaccttcaatggccgacaatacggaaatcgccggggtgatcatgctgtcgccgtagaacagcgccgcgccgcacaggccacacaccaccaggaaactgcgcagcttcttgcgctcccctgccgcgcgtcgggccagcgcggtcagcgccatgatgccgccctcgccctggttgtcggcgcgcagcacgaacagcatgtatttgatcgacacgacccagatcagcgaccagaagatcagcgccagaatccccagcacgccgtcatggttgacctgaaccccgtaaccgccagtgaacacctctttaagggtatagagcgggctggtcccgatatcgccgtacaccaccccgaccgccgccaccagcatgccgatcggctttgcgttggaatgctcggcacctgccgcctgactacttgcctgacccatcaaccactcctgccctttgacctgaggtcttttataaacagcacgtctaagctgaccctagcatgcgctgttttacttctcgtaacagacgttttattgacctcggggtttcacccgtgtgcaacggcgcgaagcatagcgcagcactcgtcgcatttccctgcataaagctggtcaagtgcgctgcccgtcgctagaattgcgcactttttgatcagaggcgtaccaaacgcccatccaccgccctgtcgtgcccggctggcggcgtcattcaataccgaggttagacatgtccaccaccatcgcaaaagccaaccccaaggtcggctttgtatccctgggttgcccgaaggctctggtcgactctgaacgcatccttacgcaactgcgtatggaaggctatgacgtcgtgtccacttaccaggatgcggacgtggtggtggtcaacacctgcggtttcatcgactcggccaaggccgaatccctggaagtgatcggcgaagccatcaaggaaaacggcaaggtcatcgtgaccggctgcatgggcgtggaagaaggcaatatccgcaacgtgcacccaagcgtcttggccgtgaccggcccgcagcagtacgagcaggtggtcaacgccgtccacgacgtggtgccgccgcgtcaggaccataacccgctgatcgacctggtgccgccgcaaggcatcaagctgaccccgcgccactacgcgtacctgaagatttccgaaggctgcaaccacagctgcagcttctgcatcatcccgtcgatgcgcggcaagctggtcagccgtccggtgggtgacgtgttggacgaggcccagcgcctggtcaaatccggcgtgaaagagctgttggtgatctcccaggacaccagcgcctacggcgtcgacgtgaagtaccgcaccgggttctggaacggcgcgccggtaaaaacccgcatgaccgagctctgcgaagccttgagcagcctgggcgtgtgggtgcgcttgcactacgtttacccgtacccgcacgtggacgagctgatcccgctgatggccgccggcaagatcctgccgtacctggacatcccgttccagcacgccagcccgaaagtcctcaaggccatgaaacgcccggccttcgaagacaagaccctggcgcgcatcaagaattggcgcgaaatctgcccggaactgatcatccgctccaccttcatcgtcggcttccccggcgaaaccgaagaagacttccagtacctgctggactggctgaccgaagcgcaactggaccgcgtcggttgcttccagtattcgccggtggaaggcgcacccgccaacctgctggacctggccgtggtgccggatgacgtcaagcaagaccgttgggagcgtttcatggcgcatcagcaggccatcagctcggcgcgcctgcaattgcgcatcggcaaggaaatcgaagtactgatcgacgaagtcgacgagcaaggcgccgtcggccgttgcttcttcgatgccccggaaatcgacggtaacgtgtttatcgacgatgccagcgggctgaagccgggtgacaaggtctggtgcaccgtgaccgatgccgacgaatacgacctgtgggctgaaaagcgcgactgatcggcaaagaaaccaaaagccccgtatctcgtcatgatccggggcttttttgtgtctatcgtttgctgatcaccgatcatccaccaagggcgacaggcatgcgtcagcattcggttattcacacacctcacctcagcgattttgcagaactggcccacgtctgggaagcatctacgcgcgccacccatgacttcttcccggatagctacattgcttcgctcaaagaaaagctgctgaccgagtacctgaacatggtgatgctgatttgtacccgggacgctcgtcaacgcatcaccgggtttgccggggtggccgcgcgcaagctggaaatgctctatatcgcgcctgaccaccgcggccagcacctcggccagcagctgttgcgctatgcaatcgagcagatgaacgcagaggagctcgacgtgaacgaacagaacccccaggcgctgggtttttacctcaagcaaggtttcgaagtggtcggccgttcagagcatgatggcctgggccagccgtatcctttgttgcgtatgcgtttgcgtcagcaacaagtgcgcaatggctgacacaacaccaaacaaatgtgggagctggcttgcctgcgatactggcgcctcggtacatcaggcgtaccggagtgatgccatcgcaggcaagccagctcccacaaaaagccatggtactgaaatgggtccgggattaaccggcgccaggcaggtacaataaccgcccccttttgttacggcccttgtcatgactgaccccatacgcctctccaaacgccttatcgaactggttggttgctcccgtcgggaggctgagctgtttatcgaaggcggctgggtctcggtggacggtgaagtgatcgacgagccgcagttcaaggtcaccacccaaaaggtcgagctcgacccggacgccaaggccaccgtaccggaaccggtgacgatcctgctgcacgcgccggttggcgtggacgccgagacggccatggcctcgatcagcgcagacaccctttccgaagaacaccgcttcagcaagcgcccgctcaaaggccacttcctgcgcctgaccgccagcgccgacctgcaagccaaagccagcggtctgctggtgttcacccaggactggaagattctgcgcaagttgaccgccgatgccgccaagatcgagcaggaatacgtggtagaggtcgaaggcgatatggttgcccacggcttgaaccgcctgaaccacggcctgacctacaaaggcaaagaactgccggccgtcaaagccagctggcagaacgaaaaccgcctgcgttttgcgctgaaaaacccgcaacccggcgtgattgcgctgttctgcgaagcggtcggcctgaaagtcatcgccatccgccgcatccgcattggcggcgtgtccatcggcaaggtgccggtcggccaatggcgttacctgtccggcaaagagaagttctaagccgtacccttttctcgacactgcctgcctgggtggtgtcctcagttgaataccaggattgcccaccatgattcacaacgacgtactgcgcagcgtgcgctacatgctcgacatcagcgacaacaagatggtcgaaatcatcaagctcggcggcatggacgtgaccaaagaagacctgctgacctacctcaagaaagacgaggaagaaggcttcgtgttctgcccggacgaggtcatggcgcactttctcgacggcctggtgatcttcaagcgcggcaaggacgaaagccgtccgccgcagccgatcgaaaccccggtgaccaacaacattatcctcaagaagctgcgcgtggccttcgagctgaaggaagacgacatgcacgccatcctcaaggccgccgagttcccggtatccaagccggagctgagcgcgctgttccgcaaattcggccacaccaactaccgcacctgtggcgaccagttgctgcgtaacttcctcaagggcctgaccctgcgagtgcgtccgtaagccatgagttacccggtctcgcccgtcggttttgtgcgctcctgtttcaaggagaagttcgccatcccgcgccaaccgcaactggcgcctgccgcccgtggcgtgctggaactggtggcgccgttcgacggcggcgaggcggtgcagggcctggagcaggtcagccatgtgtggctgctgtttctgttccacgaggcgcttgaagacaagccacgcctgaaggtgcgcccgccacgcctgggcggcaatacgtccatgggcgtgtttgccacccgtgcgacccaccgacccaatggcatcggccagtcggtggtgaagctggacaaggtggagcccggcaagctgtggatttccgggattgacctgctcgatggcacgccggtgctggatatcaagccgtatgtgccgtatgccgacatcattgacaccgccaccaacagcatcgccagcggcgcgccgcagccgattcccgtgcagtggctgaagacggcgctgcaacaagcacaaggccatgcccagcgcctgggtgagcctttggtggaattgattgatcagtgtttggcccaggacccacggccggcgtatcagacgccgggaccggagcgtgagtatggcgtgcggttttgggatgtggatgtgcgctggcattatcccgaggctggggtgatttgtgtgctggaagttatcgcagccaagtaaaagccgaaaacaactgtgggagctgcttgtgtgggagctggcttgcctgcgattgcggtggttcagtcactgatgtgctgaatgacacactgctatcgcaggcaagccagctcccacacaagccggctcccacattttttctatcggtgtttacttctcgacgaacgcgcgctcgatcaagtagtcacccggctcacgcatccgcggcgaaaccttcagaccgaagctgttcaacacttcgctggtctcgtccagcatgcttgggctgccgcacagcatggcgcgatcgtcctcggggttgatcggcggcaggccgatgtcgctgaacagcttgccgctgcgcatcaggtcggtcaggcggccttcgttttcgaagggctcgcgggtcacggtcgggtagtagatcaacttgtcacgcagggcctcgccgaagaactcgttctgcggcaggtgctcggtgatgaactcgcggtaggcgacttcgttgacgtaacgcacgccgtggcacaggatcactttttcgaaacgctcgtaggtttccgggtcctggatcacgctcatgaacggcgccaggccagtaccggtgctgagcaggtacaagtgtttgcccggcttcaaatcgtcaagcaccagggtgcctgtcggttttttgctgatgatgatctcgtcgccttccttcaagtgctgcaattgggaagtcagcgggccatccggcaccttgatgctgaagaactccagatgctcttcccagttcgggctggcaatggagtaagcgcgcatgagcgggcggccgttgggctgctgcaggccgatcatcacgaactgaccgttctcgaagcgcaggcccgggtcgcgggtgcacttgaagctgaacagcgtgtcgttccagtgatgaacactgaggacacgttcgtggttcatgttgctcatgtacgggaaactcctggaaatgggtctgcgccagaaagataggtgcgcaattgcacagtattctaatggcggcgacaatatctgttaactggattattaagataagggttatcggttatatcgatatgcgatttactctccgtcaactgcaagtcttcgtcgccgtcgcccagcaggaaagcgtctcccgcgctgctggccttctggccttatctcaatccgccgccagcacctcgatcaccgagctggagcgccaatccagctgccaattgttcgaccgcgcgggcaagcgcctgagcctcaacgccctcggccatcagttgttgcctcaggcggtggcgctattggaccaggccaaggaaatcgaggatctgctcaatggcaagtctggtttcggttccctggcggtcggcgccaccctgaccatcggcaattacctggccacgctactgatcggcagttttatgcagcagcaccccgagagccaagtgaagctacacgtgcagaacactgcgcatatcgtgcatcaggtagcgcactacgaaattgatctgggtctaatcgaaggcgactgcagccacccggacatcgaggtacaaacctgggtggaggatgaattggtggtgttctgcgcgccccaacatcacctggccaagcgtggcgtggcgaccatggacgaactgacccatgaggcgtggatcctgcgggaacagggctcgggcacgcgcctgacgtttgatcaggcgatgcgccatcaccgtagcgcgctgaatatccgcctggagttggaacataccgaggccatcaaacgagccgttgaatcaggcctgggcattggctgcatttcccggctggcgctgcgcgacgcgtttcggcgtggcagcctggtgccggtggaaaccccggacctggacctggcgcggcagttctacttcatttggcacaaacagaaataccagacctcggcgatgcgcgagtttctggaactgtgccgcgccttcaccgccggggttcagcgcagcgacgagatcgtgctgccgagcattgcctgagcgttaaatcaggatgacggcccacaccagggtgatcatggtcagcgcaacgaattgcgcagcgctgcccatgtccttggcgtttttcgacagggggtggcggtccagggagatccggtcaatcgccgcctccacagccgagttgagcaattcaacgatcagggccagcaggcacactgcgatcagcaaggcacgctcgacacggctgacgtgcaggaaaaagctcagcgggatcaggatgacgttcagcaataccaactgacggaatgccgcctcgccggtgaaagctgcgcgcaggccgtccagagaatagccccctgcgttgaagatacgtttgataccggtttgacccttgaaaggcgacatagaagtaggcaactgaaccaaaggagtggggaagctagttcacgcaaagtcaaaaaagcgtgaatcggttacatcttaatgctgcgaaattgactcaagttgttgcaagagcagcgccgcctgggtgcgagtacgcacgcccagcttgcggaaaatcgcggtcacatgggccttgatggtcgcctccgacacactcagctcgtaggcaatctgcttgttcagcaagccttcgcagaccatggtcagcacgcggaactgttgcggtgtcaggctggcaagcccgtcacgggcggccttggcttcatcggacacgttgatttcttcaaacgcttgcggcggccaggacacatcgccatcaagtaccgtgcgcacggctttctggatagcttcgatgccgctggacttgggaatgaaaccactggcgccaaactccttggagcgcaccaccacgtcagcgtcttcctgggccgagaccatcaccacagggatctgcgggtactgcccgcgcaacagcaccagccccgaaaaaccgtaggcaccgggcatgttcagatcgagcagcaccaggtcccagtcggacttttcggtaaggcgaacttccagctcggcgatgctggccacttcgaccagacgcacgtccggcccaaggccaagggtaacggcctgatgcagcgcgctgcgaaacagcgggtggtcatcggctatcaggatgtcgtatgtggccattgattaaatgatcctgtttttatgggcgccccggggaggagatacaagcactacgcccgcgggcattttagcgggttccagggttgcggtgccatcatgcaaacgtcgtctggctataccgccgggatataaggtgccagacgtgtatgtaccgcgtcggtcgaatccaccggcaactggaacttggccgccaggtaatgggtgctgaaaacatccagataggcgtccagcacttcgctggcgactgggtcaccagccagttccaggcacagtgcagcgacttcggcggtacaaaaatgatcatcacgcttggagcgtcgcagtttgtagcgagacagctgttcaggcgccaggctcagcaccggcaaatgctcaaggtacgggcttttgcggaacatcttgcgcgcctcgctccaggtgccgtccagcaggatgaacaacgggcgcttgccctcctccacgttcacttcactgacaacgcgctcaggtgcgacaaactctcccggaaacacgatgtagggctgccattgcgggtcggccagcaatgtgagtaagccggggtcgacttcggtgcgcgaccaggcaaacgcggtggtgtcgttgatcacatcagcgatcagccagccggtgttgctcggtttcatcggttcgacgtcgtgcatcaacaagcacatggcggagcgcgccggcaccttcggacgccaggcgcacaggcagtactcgggaatcacccggcagccggggcagcgttcggcgcgtgagccccggttaagaaaaggtcgcacggcccgggccagacgctcggcgcgcaagcgggaaacagcatggctcatcgcaggcaccgcgagcaggggtcaatcgacacaggggaaactcgaagaaggctttaagtggccgcagtttaccagcgatacgcctggctgtagtggcgaagggtcacctataattgcgcgccactgaacgcacagcgcagtggttggtctatgcaccagtaaccgaatcaggagagtttcatgctgcgttccatgctgcgccttgtcgttccgtccgtcgcccttgcgctggtcttgcccatgggtgcccaggcggcctcgctgctggaggcccaaatgaaccgcaaactgcaaagcgtcgcggctgaaagcaacaaggacctgccccgggaaattgatgaaaaaaccctggaagtggcctacaccgttgaaggtatgcaactgatcgatcatttgagcgtgcaatcggatcgcgcagaacagatgcgcgccaaccccaaggccgtgtatttccagttgggccaaagcgtgtgcctgaacaagggctaccgcgagctgatggccaagggcgcggtgatgcgctacgacatcaccgagaacaagaccaaccgccctgtcgcgtcggtcaagttcgcggaagcggactgcccggctcccgcagccgcgaagaagaaaaagtaatactcgcttgcccctcgcgcgcctctgccctgaggcgcgcgcattcccgcgctgcacctgtccgccgacggctaaactgccttatgtgtgaccaataaccggttgccagccataggtttttcggctcatgatcaagccatcccggtaacccatcgacagcgtttttcacgccgttctgtaacattttcagggcaaaagagggttgccctcctgcgacatgcagtgcaaaggtttccaaatcacaaggaacatacagagacagctttgccgcttggcgaacaccgtgcaacgcctcaaggcatgcagcgacacaagcagtgtcgtggccctggacgaatctctcgcccgcagcccagcctctgtgaagaaggagaagttgaatgccttacgaatcgaatgatcgcctgctccggcattttgaagaaaacggggctgacctcacgcagcaggtcgacgctcaactccagctgattgcccccaacagcccgaacattcccctttatcgcgacatgatcctgaccgttctgcgcatggcccaggacgaccgcaaccgctggaacgccaagatcaccctgcaagcgatccgcgaactggataacgcattccgcgtgctggaacagttcaaggaccggcgcaaagtaacggtattcggctcggcgcgcacgccggtcgaaagcccgctgtacgccctggcaagggaagttggcgcgatgctcgcaaaatccgacctgatggtgatcaccggcggcggtggcggcatcatggcagcggcgcacgagggcgcaggcctggaacatagcctgggcttcaacatcaccctgccgtttgaacagcacgccaacccaaccatcgacggcaccgaaaacctgctgtccttccacttcttctttacccgcaagctgttcttcgtcaaggaagccgacgcgctggtactttgcccgggcgggttcggcacactggatgaagcgctggaagtactgacgctgatccagaccggcaagagcccgctggtgccggtggtactgctggatgcgccaggcggtggtttctggcaaggcgccctggactttatccgcagccaactggaagccaaccgctatatcctgcccaccgacctcaagctggtaaagctggtgcacagcgctgaagaggccgtggatgaaatcaaccagttctacgccaacttccactccacacgctggttgaagcgcgagtttgtaatccgcatgaatcatccgctcagtgaacgtgcactggctcatttgcagggcgaatttgccagcctgcgtgtaagcggggaatttcagcagctctcttacacgggcgaggaacatgatgagccgaggttcagccatttgacgcggctggtgttcaatttcaacgggcgggatcagggccggttgcgggagttggtggattacatcaatttgccggagaactgggcacaggctcagggcaagacccagcagcgtgttgcacccgaacctgcctgagttttttgaaggcaaaaaaaaaggcccactattttcatagtgggcctttctatttgtgttgatgctgatgaccggggccgcttcgcagcccagcgggagcaagctcactcgccacaacggcgcgtttgcgctttcaattaatcatccagatcgcggccactcaataggcggctgatcatttccatcgaaaacccgcgatagctcaaaaaccgcccctgcttcgctcgctccttggcatctatcgggagatgaccagaaaacttgcggcgccaggtatcttccaactgcgcctgccaactgataccgcattcacgcagtgccaggtcaatgtcagcgcgctgaagaccacgctggctcaactcctcgcgaattcgcgcagggccgtaaccggagcgggctcggtaagacacaaagctttcgagataacgggcttccgaaagcaggccctcttccgttaaacggtcgagggctgtttcgatcatttcgggctctgcgccacgctgacgcaatttacgcgtcagctcgactcgaccatgctcacggcgagcgagcaggtccattgcagtgcgccggacggcgacgggtgtatccagtacaactgtcatcgtttggttcagatgtcagtgtcgacttcttcaacttcttcaaccggctcgcggttagcggcagctttcacgtctggggctgcggtgagcagcttgtcgcgaatctgcttttcaagcgtggcagcgatatccgggttgtcttgcaggaacttggccgagttggccttgccctggccgatcttgctgccgttgtaggcataccaggcaccggacttctcgacgaaaccgtgcagcacgcccaggtcgatcatctcgccgttcaggtagatacctttaccgtagagaatctggaactcggcctgacggaatggcggagccactttgttcttcacgactttaacgcgggtttcgctgccgacaacttcgtcaccttccttcaccgcgccagtacggcggatgtccagacggaccgatgcgtagaacttcaacgcgttaccaccggtggtggtttccgggctgccgaacatcacgccgatcttcatacggatctggttgatgaagatcaccaggcagttggcgttcttgatgttaccggtgattttacgcagcgcctgggacatcagacgggcctgcaggcccacgtgcatgtcacccatttcgccttcaatttcagccttcggcaccagggctgccacggagtcgaccacgatcacgtcgatggcattggagcgcaccagcatgtcggtgatttccagggcttgctcaccggtgtccggctgcgaaaccagcaggtcatcgacgttgacgcccagcttgccggcgtattcagggtccagggcgtgctcggcgtcgacgaacgcacaggtggcgcccattttctgtgcctgggcaatcaccgacagggtcagggtggttttaccggaagattcaggaccgtagatttcaacgatacggccttttggcaggccgccaatgccgagcgcgatgtccagacccagagagcccgtggaaatagccgggatcgcctgacggtcgtgatcgcccatacgcattacggcacccttgccgaattgacgttcgatctgacccagggccgcagccaaggctttcttcttgttgtcgtccattaaagtcctcacgtaatcaataaggcctggtcggccaacacctgtataagtagacagtattgttccacaaagatccgggatcgcctacccctgattttcgatttctgctacagctcgtcgcaacaagccctccagcgcggcctttaccgtttgtcggcgcacctcatcacggctgccggggaagtgcgccagctcgctcgtcacctcgtcgcccacgccaaatgccaaccataccgtgcccaccggcttgtccggcgaaccaccgtccggcccggccacaccgctgaccgccacggcaaagcgcgccaggcttttttcctgcgcgcccctcaccatcgcttccaccacgtcctggctgacggcgccgactttggcgaacagtttttcgggcacgcccagttgccgggtcttctgtcgattggaataggtgacatacccggcctcgaaccaggccgaactccccggaatgcgcgtgatggcctcagcgataccgccgccggtacaggattcggcagtggtgacatgggcattgagcacttgcagacggcgacccagttcagcagccagttgagtgatttccttcacggtcgtctccaggagtgggcgggggtttgcctaccctacaggagcaaatggcacacgcaagtgacagactgatgcaagacgctaacgggcgacggcgtgcacgtaagcctggcaagcacgcaaggcgatcaaggcgttatcgccgtcgtcggtgatgctgataattcgttgagcatgcgccgggtcaagtcgggcgcgtgcggttgcatgaaccacgccgccggtggtggcaggggctggcactgtacaaccgttggcggggtcgctggcgtcaagaaggactgacagccgcacatcagcagtggccaagcggtcacgcagagtagcctggttgcgcctggcatcgctcaactcccgggtatgttgttgatcgccggcgctgagttgttgttccagcgccagccgtttgtcttgttccaattgctgttgatgcaaggcaagggagcgttgctggctgagtgcctgcacttgagccgccgattgccgttcaagctgcgcgccgtaacgccaggcctgtacctgccacacaacggtcatcaacaggcaaataccggctacgcggcaaaccgctaggtaacgcatagcaccgccttggcccgcgcccaaaattgcaaacggtcatccaagccattgagcccgccgttgatgcgccgggtgatggtggtgaactggtctttgtcggccagctcgttcaaaccgttgctttgccagaaccaggcggcggattcacaggcccattgcggttgttccagcagttcaggttgttgcagcaggcggtcgtcgccgaacaacgcctggctgcatgccaggtagttgtgccggccggtgatctggatgagccccctgccccggtacttctggccatcaccgtcagcctcaggcgtattgcccagccgcacggccaggggcccggtgtcgtatttgctcaggtactggtcgctgcccagttcgcgcacgtaacgcaactcagcggattcgtgagcaatttgcgcgagaaacgcagcgatgcgcttgggctgatcgatctcaaacctggacattgccgcattcaatgcgggcaaaaaaacgcccgctctcaggcgggctccaggcaagatttgaagcagttgagacagtgttatcaacataagccctcactcagccggggcaaggccgctggccttgatcgtgcatcggtaactttcgctgcgtttgccactggccgtcacgctgtcgatcgaccaccggccctgcatgaagccgggccacgacgcgtccagcagtaacaagccttcggcgccaaatgccggatttccggggcacaccacattgacctccaacccttcccggccgactcgacgcatttcgccctcagcggcagttctcgcttcggcctcattctggtagcgctgcgtcaccaccttgaagggctcgatccccacctccaccgtccgctttttaccggcccccgcatcccaccaggacgctcgcgcccccaggtaggtggcccggctggagtcggtgaaagtggcgttgataaacgcgcggtcacccgggcgattgtcccgcgtgatcgacaactctacatccggcaggattttccccgacagcgagttgatcgtgcctttgcggcccagcacatacagcgcatcgacgggtttggccaccgcgtcaaagcgcttggccaaccgcgtcagaaacgccatgtcgctttcattggtctggtcgatgtgcaggatctgctcattctccaggtccggcgccacacgcggtgagaagccgtagcgcgtcgtcagttggcgaaacagcgcacccaggctgatcggcccatggctggcggtgcgtcgctgcttgaactcggcgtgatcaaacggcgccgccgtcgccaccagcaccaggcgcaacgggaacagcgagggtgtgcgcttagtgatcctgaaccgtcccttatccaccaggccggactcgaggtaaccgacgcgcaggccgatatttccgccgagactgggcagcccttcaaggccttcgatatcgagtgtcagcttgagctggtcggacttgaaaccggccgcatcggtatgttcccactccaatagccgctcattgagcagtgcggcattggcaccgtaaatctccaccacgggtgtgaatccaagtgtcatgattgctccttaatcccaggccgaaaccggttgcttggccacaggctgcgtctccagctccggcacgatcacgctgacacccgccggcaacactgcgccctgttcggccagctgcggattcaagcgccacagcacttcctcggcggcgtcatcacagcggccaagctcgcggtagagcaacaggttcaccgagtcaccggcaatacttcgaaccctacgcattgacgaactcctccagtaccaacacccaattgatcaccatggccgtgccatcgtcgatcacgctggactgtttttcgtccaccgacttgacggtccacaacccccagttaaggcccacgccatcgaccaacggcaacggcacgcgcagggcctgcagcgcacgcaactcatccagccgcgccatgcccagcgcctttgccgccttgccaccgaaggtaagtgtttcgagcgcctgaccaacttgggtggacttgggtttgccggaaacaatatccaggctgccccagcccccgctgctgacgcggcccagcgtgtcgtaggcgaacccacgggccagcccgaaaataaacgggcccaaagccatctgttgtcgcatcacaccactcctgtatcggtcagggccgaatcacgtcgcgtgcccagcaggctgtccatcgacagtggcgtgaattgcgcctctatctgttgcaccacgagcgcggccaattcttgatagcccgcctgctcgggcgcattgatggtgatttgcggggcgaagttgatctggcggttgtcggtttgaaggttgttcaggttttcgccgatctcggtaggagacggcaactggtcgctcagatccgcggctttttcacccaactgcgagccgacatcgctgccgacaagcgtgccgagcacgccgcctatcgcaccgccgatggcgcttccgatcgcaccgcccgcaactgtgcccgcaaccggaatgatcgagcccagcgcggcaccggcaaaaccaccaactgcgcggccaatcatcgagcccacaaaacctccggcaagccctccccctgcggagcccacggcgttaccgatgaggtgtttgtctccggtctgcactccgttgacgagatcgacacctgcgcccgcaatcacgcccaacgttgcgaccataggcactgcgcgttttgcaacgttggcaacttgcgccgtcttgccgaacaaacctgaaggcggagggctcggcgtacgcctggtttcaggacgacgtttgtttttggggggcttcttgtttgtggattttccggtctttttggaagcgctgtcgctgggggccgtgtcacccaggattgttccggcggccttctcgaataccttgcccttcaccgcaccgagcaacccggaaaacacgccggacaacaccggagccagcaccgcacccgccaaggccacggcgaccgtggccttgggcaacgcctcagccaaccaacccacgccattgaccaacgcggtcattgccgacagcgaggtatccacgatcggcgccaacgccacgtccttggcgctgcccaggcgcgtggtgctggcctcgtaagcctgttgatgcgcttgcgtggagtctgcgcgaaccgccgccgaacgcagcaccgagccttgctcaccgagtgcggaggtcgcgtacagtgacttgtcagccaccagcgaaaacgcctgcttcaccgtgtcgatggccggtaccaggctcagaatcgactggttaccgtcaaacagctgcgtcgccagtgccgcctgcttctgggcaggttgcgccttcagcgcctcaagcacggtgagcagggtttgcggcgcgtcctgcttcatcccggttgcgagcaatgcgggatccagcttgagcgctgcccacgcgttgagctggccttcagaagcgccatcacctttggccagaacgctgctgattttttccagcccggcacctgccgcgcccttgttgttgcccacactgagcaacgcggccgacagcgccgccgcctgttccggggtcatgccggcggcggtggccgcagccccctggcgttgcacaatggcaccgatatccgccgcttcagccttgagcgaaacactggtgcccaacacattggttgcgtccgccaggtcatgggttttcgtgcggtcgagtttcatcgactcgcgccagccccccatcatctcgccggcatttttgacgtcgatcttgaaggcgaccgccatgatcgctgcgtcacgggcgaactgtgtcaggtcttgctggcgagcaacgccatcgatattgcccgaagcgtctttgtgttcgctgccgacacccgaacgagcggccacatactcgacccgagagaggtccacggcgcttgcgccactcgccgccaccatccgttccgtggccatcgccaggttggcttcacgcaactgtttacgctgccccccgacaaatttcaggacctggtcgaggtcggtcatcgcggcatccagcgcctgcgagggtttaagcttttcagcgggcgttgcggtttttgcctggcctgcgccctcgcccgcgtcggtttgtcgagcgtccatcagcttgagcagcgaagcgttgaacagctcaagggtctccaccagccgggcctgccccgccgccagatgattgatctcaacactggcgttggccaaggccagacccagctttacggcctcgcccggcactgcccccgcgggatcagtaagcgttgatgcgatgggtttgagacgggcctgcgccattgctgtttcacgcgagcccagcgtcaggtcgccgtccgtggcgatggctgacgcgcttgcatcgttattgcctgccataccgctctactcctgtttgacgccaaggcgtttgatcgcgatgtcgtagcggcgcaatgctttaccggcgtcccagtcgaggatctctgcctcattgaccgagtaaatcagcggcaccacatcgaggattacttcgatgtcgcgctgcgaaagaagtccgccggtttgtttaaaaaatcgtcgatgcgctcctgcagttccgtccagtcgggcacggtcaggccggccaggtcaggaatcatcaagccggtgcagtgagcggtaatgaactcggcacgctctttattggtggtcagttttttcatgactttggtggcacgcagggccggcatttccaggctcagcgcggtcaggttgcggccagcggcgtccaggggcagcagcagttgcacctgttcatgctgcgagggctcatcccccttgccgaggaagaacgatgccgggcgtgtcgacatttcgtgcacgtattgggcgatgctcacgtagtccgggcgcttgagttggtcgagctctttttccgacaggccggtggcgagtttcgccagttcgaagaactggtcgtcctcgtcatcaccggcccgggccagcgcctctttttgcgcggcgtagtacaacggtttgagttgaatctgctcgatcgtcgcgccggtgtcgccggtaatcggcgagagcagaaggtgtaacggaggcatccaggccatggggcaattccttattgaaacgtggctgaaaagcgatctgaagcagggtgcggtcaaatgtgggagctggcttgctgtggcgagggagcttgctcccgctcggctgcgcagcagtcgtccgctttttggggggcgcttcgctccccagcgcaagcaagcttgctcgccaccgcaagcccggctcccacatttgaccgtgcccacttcacatcccggtcgtgcttaaggcatcaatactgcgcggcgcgcatcaccgagaatgtcgacgccgttgagcacgaacttctgggtgcgtacgtcgatgtcgatcaccggaatgccgttttccaggcggttgtaggtgcggcaggtcagttccagcgtggtggtcggtttctcgcccattttcagcggcgtctcggccaggcttttcaacttgccgccgacggtgtggtaagtgaagtaagtcttgccgtcctgatcctggccggcttcgcgcacattcagcaggatgtcgtcgcccaggcgcacgcccagcgccagcatgatttccggcccagcaccttgcagctccagggtggcgttaagcgctttggcgctcttggccatttcctcggcgatgaaccgcccgccagtcatggactccatgtcgaagtcgattttcggcggggtgaaggaggtcaccgtcgcggacaacggcaggccttgcagggtggccgcaatggcctgtcttacacggttggtaaacattagagaacgtcctccaggaactgctcgatgatttcatcgcgggcattgagttgataaatcatgtgttcgttcggcgcgtagcggccgtagtcgatgacgatgaaccaggtgccgttcttgtacttctcgacactgttgagttccgggtgcaggtacacgctgccgccggggatggtttcgtcggccaccagggtttgcagccagtcattgatgcgcttgacctcctggtccatgaaggacttggtgaggttcttggccatggctttctggccggccttgaccagcttgcggctgatggcatcttccaggcccacatagctgatgaacttgccggtgatcgagcggttacccagcagcgaaaaaccgccgaggatggtgcgggcgtagtagctcacgccgtagcggttgagcaggtcgccttcggtagaggtgtcgaggatgttgtactcgaccacgcgggaaacgtcctcggcgaacgtcacctggttgcccgggctttcccactgcttgaccttggccagtgcggcgatggccagcgaggacggcgacaggaacacgtttttcttcgccgccttggagtacaccgacggcatgttgtgcaccagcaggcaacggtcgaagccgaggtcggcaccgcccagctcgccgctgtaggtcacttggtcggcgacgctggcgtccttgccatccagcaccacacgggccttgatgcgcttgccgaacgaggcgaactcaccggccacggccttggtgccggtgaagcccggcgcgccgatgatggtcaggtcttccggcacgcctgccagcgccgccaggcccagtttgcggccggtggttggttcgttgccgccgatcacattgttgatcgtgtcggccggggttgcgccctcctccacgatcaccacatagaccggcaccttgaccactttgaggatctggtacaccgcctgaaacagcgtgcccgactcggcgccggtcggatccagcagcgcctgggtggtgaagctattgatgcgaaacggcgcgtttttcgggatcgacgcatgggcattcggcgcagtgccgaccaggccgatcacgttatcacccaggccacccatggcctcgggggattcggtggcattcacggtgatgccgttgtgctcgaagttcaaaacctcagccatggttagtcagccttctttggggtggagttgaggacgcctgtcagttccaggcggccagcggtgcgcagggcggatgcttcgacgtcgagcaattccagctcctcgccgacggtggaccaatggccacctccggtggggaatgggatgaggacggtataggtttggcggttggccatgggttgaatctccgggtcgaaaacgccaaagcccctgcgggaggggctttggggaggcgaaaaaaaaccgctttcgcggtgggttatttcaggaaggttggcagttctggccacaccagatttgaagggtcgccaccttgctcgggaatatcgcgaagggctttccgataagcagcaacttcagcgcgttgtgaatcaattgctgggtaatccagcaactgagtgtagtcagtgttattcagcaactgattgcgacgtgcacgaatagcagcccactcaacacccgccaacggggtagccagtggcaacagaatcttttcatcgttggaaatatcagacatgtagcccccttaattaaatacaactttttcagccagagacaatcttgatttaagatcaccgagcgcaaatagccggccattaccgacgcgcatagtatcgatgcgcaccgttgtgtaataaacagacggaaacaaaacgcgcaagacaatgttgccattggcatcgacatacacagttggagacatattaccgaaggtagacacgctgtgaagcgacctgttgggttgatagcaataccccaccagcgtttcatcaactatcttcgcggttccgtaactatagcctttgatattgaaccaaaacatctccgaatcaacgttgatattcagcggcactttaaagtgcatgtagacattgagcattccacccaaatctgtcgaagcgaaatcacccacagacagggcaccaataggcgcgcctacaccgtcgaggccaccacaagtgtaaacatgcccttgaaagatactgctgcgaatggtgccaatcccatcaggctttccttggacatctttaaggctacgccactcattgaactgtgccagcgcccccgccatcgtcgtattgatactgccaatttttccattgaccgcggtggtcaagttgtttgccgctgtgaccagcgacgtaatagtcgtttccagactcacgtttttaactcctgaattagttaagccttaacggcccgattccagcgacatcacacgaaacaacagttccgtatgccgagccatgttgtcgatatccgcagtagccagtaccgcaatatcctcgcccaataaaatattgagattgtcactccccaccacaatcgtcacgctatccgccggcaacggcgaaatatccagcgtgaacttttgcagcacccgcgccgccgccgctttatacgtcagcaacttccctgctacggagtacaccgccagcaaagtcccgctggcgaggtaaaaaccgaactcgccaatttcatattcgccctcgccatcaaacagcgcggccatcctgagttgccggtcgcccaggtcctcataatccacaatggcgacccgctggcgttcgtcacgcaaggccacttccgtgccgtccgggttgtagcggccggtgccggcgccgatgtgggtgatttcgcctttcaggccctggttctttgcctgcagcacttcatccaaacccttggaggtgaagcgcaccaggcgcgttatgtcatctgtcatggctgcgccctgaggtcgtagtcgttaatggtgtagtgccgggcgaacccggcactgttaagccgggcggccagcccgaattcaggcaacacgccttccagctgcagttcgccatccgtcaggggggtgtgggctgcgctgctgaaggacacgccaccgtccagcttcacgtcgggcaaggcccccggttggctgtcatccagaatgcttagccctggatccgccgccgcggtgagccgcaacccttgagcggtttcatgcacgatcgtgatcgtcgcccggtcacgctcgctttgtgccgcgttgatacggcggatcaagcggttgtggtcaccgctggaccaactgcgcccgatgatcgcctgcacgtcgaaggtgtagggcaaacccaagggccgctgctgataccaggcactgatattgggtgtaaaacccagcgactccaccgcgtaactcagggctttgggcgtgcccgcctggcgctggatctgccaggacaaggccaccgtcagacgtttttccgactcgctggcatccgcatcccattcgctgacgccacgatccgcagctagataaggaagaaactcggctggcgtctgcaacgggttcatcaacgccggaaacggcggcaccacccggtcaagcagcttgccaaaccccaggtccagcgccttttccaatggggaactgttggcgggtaacagacttgccttgggctcactcatagcgtgtgcacctccacctcgacgcccgtgcaatacggggcctggaacgcggtgctgatgatcggcgcctggggttcaagaatctgcagttgcgccgccccggcgctgtgaatggcgtagtcgatccagctcgggtcgacgcggccttcaaggcgatggcaggactcggcatagtcacgcaacagtttctgggcggcgacttgggtgagccccgaatccgggccggcgttgattttggcgaccacacggattttgtagggttgaatctgtgcgccctgaacgctgaccagatcggtctccgggcgcacatcgggccgtgcgaaatggcgacgcacgccgtcaagcaaagcggcagacggcgtgccgtcgccttcccttgaaagcacggtgaccatcacttccccgggggcggttcgacggccattgccgtctttgacctgcgccgcatagccgtccgggtcaaaggtgtagctgaccgttaccacgcccggcgttgcgctttgcaccttcaccgatggccgttcgccgagggtgaacacctcgcggcgatactgcatccgcgagcccgccgccggagcgtggggtgccaggtaataacgcaggcgggcgtcatcgtcgctttccagggtcggcggcactggcgggaaggcggccgggtcaccggggtcgagcacctggcgctccaggcccatgtcggcgaggcgggcatccaggttgctgccggtggcccaccacgccagcatctgtttgatgcgcgcattgtatttgcgctcgtgggtttgcagacggatgcagaaggcttcaagggccagggtcagcagctcgctttcattgtcgaggctgaccttgagtttggcggagctttgcggggcacgggtggccacgtaatcgataacgaacgccttgaattcagccagcagcggctcgaactcgtcgaccgcaatgatggccggttcggccagttggttctggcccgggatcagcatgctcatgtcacgacctcgaaagattgttggcggtttttccaggtgccggcaaaccgcaacagcaaaccggcgccttggcgggtggcgacgatgacctggggttgaaaatcgccgatgccgttctgggtgttatagaaggcttgggcggcatgactttgtgcgaggagcagcaagtcgtcgcccaggttctggccgagcagttgcgggatcatcgagccgtacagcgggcgcttctggcgagtgcccacgggagtggtcagcgctcgggtggcgcgctgcacaaattgcagccagtcatcgacggctgccccggtgttgcgatcgataccgatcatgggatgtccttgtcaggggctgatgacccggccctggtggtccaccaccgggccgctgaagtgcgcgccgccggcatccagcaacaggccggtgccgccgatttgcaaggtgatgctctggggcgtgatcgtcaggctggcggcgccgagcttgacgtcgacccgctcacgggaaccgctgaatgtggtgggcccgttgacccagttaaaggtatgactggcgtcgtcgtagtcgctttgggtgccgtcctgatggcgccgccgggtcaggcttgcaacgctggagaccggcggaaactgactactgttgaggccgaacagggctacagactggccgccaccttccccgccgccgtagttaagcaacaggcattgttcgcccacggacgggatgcgtgtttcggtttgcgcgccggcgctggggttgaaaaaacggatggcgggcgtcagtagctcgccgtggctgaccttgcaggtattgctggcggcgtcgacctcctggcacacgccaatccggcagaaactttcggcacgccggtaaaggtcttcgagctgggcttccatttccgccaggcgctcgacgatcggccccagctgcatgcgtaacagcgcgtcaaacatgggctactccgccagtggtttgtattgagcggggtcgttaatgttcgagacctcccaggtgcaggcaaacagcggcgtgcctgtaggatcttcgagcagcagcggccccaggtagagggtttggctgaaggacacggtccaggtgtcgtagtccgtgccgactgtgggccgtggcgtgggagccgcgacgatattcgttggcagatcgcattgctgccagggcaaggtccaacggttgtccagcaccaaatccatgagctggctggccaagtcacaggcatcaaacggcaatgcacccggagcgaccatggcctttaacgaaatcgtcaaggcgtgagccttgcgtccttcgcgggagcgaatacccgggctattgccctccacggtaatcatcacgccggtttcgccaccggcgccctggaagtcctgatggctgcccaccttcaggtccgggaaggcagcgtgcaccgccgcgccaatggcttggggcagttgagatgttttttcgataagcgtcatttgaatcgcgtccttgcaacggttattgcgggcccgggcgggagctttcgttgattccgatacgcttggccgcccaccgttcatacaggccgatggcgacgtcggcaccggccatggcggtcaggcaaccaatggcgccggcggtccagatcgacatgccggcggcgtagcacagcatcagcgctgaaaccccgcacaccatgcaggcaccggacctcagcaccagccgtcgaatcaacgaccagccacgcgcgccctccttgtctgcacgccacatttccccggaaacgccgccaatcacggccaatatgatcaccagccagatcggcatttccgctaacgcttgctgctcgtttgtcatgtcacgcctcctggctgagctctaaatagtccgtctttcattcacacatgcttcgataggtaggcattccaaaaagcccggttgcccgggcttttcagtaatgctgtcctcgaacgttcggcgctactggcgcggtacggttctttcctcaatgtttttccgaccacgatccctgtctgccggataactgcttctggtgctttacgctgcacacccgggtcagttgccaaccctctgaaccgttatgaggccggttcatcgctgcctgttttttaaagcggtgaaactaaagagcgtcggcatccttgccgggtgttgcctggcatccctgccatcgcttcgatggcgtccttgccggtattgcgtgccttccttgtctttcctggcagcatccttgccgcctccaccaggccttgttggctggcttgagatggagaatatgcatgtatgcatatacagtcaatgcataaatgcatttatttttaccaatcacatgcacttatgcattcaaagccttgctggccaggggtttgccgattttctacaggcgaaaaaaagcccgcacagtggcgggctttgtcttatgcgaggaggttagcgggcgtacatgccccaccaaaacacatgcccaaggatgctgatctgctcatcctggatatcctgaaagctgtagtcctcatccgggtgctcatcgcggttgaagctgcgcagacgaatcccggacggcaggcggtagagctgtttcacgcgcagctggccattgtgattgatggcatacaagtcgccgtcaacgatgtccccaatgccactcttgcccgcattgacccccaccgtcgcaccgtcgcgcagcaccggcaacatgctgttgccgcgcaccgtcacacacttggcctggtcgaactgcacaccgttgtggcgaaggctgcgcttgccgaaccgcaggctggccttctcgctttcctcgatgacgaatcttcctgatccagcagccaattcaacctcgcgcagaaaggggatcgacacctcgtcatcattaacgggcgtgtcgtcgtcccacaggcttatgtccttgagttccgaatgcatcgggtcgcgcccatcgtcccgcgaaacgcccaccgccgcgcgcccgcgcagttggtcggtgctcacgcgaaagtagtcggcgatgcgggaaatatgcttgtccgacggatcaacgatcttgccgctaaggatccgggacaacgtggattgaggcacgccggtacgccggtgaagctccgtgggggagatccggtcgcggtccagcaattctcttaagacggatgaaacgttgcgtttttgcataacggggatgatgacgggggatttgggggttggcaaatgctaatttgcatatttcatgcatattgcaggccgcttgctccctcgccacagttatggcgtgctcctttaatactggctggcagtagaggcctcgcccttttgtattttccctagccgtttgcgaactgcgaaccctcgacctcgcatgttaaccttgccgccatcgcaaaatcgcagggccaaacgccccacctttgccccactcctttcaacgaatttgcctacgacccaatgagtaaagccacttcagatctgtcctcccacaccccgatgatgcagcagtactggcgcctcaaaaaccagcaccctgatcagttgatgttctatcgcatgggcgacttctacgagatcttctatgaagacgcgaagaaggccgccaagttgctggacatcaccctgaccgcgcgcgggcagtcggcggggcagtcgattccgatgtgtggcattccttaccactcgctggaaggttacttggtcaagctggtgaagctgggcgagtcggtggtgatttgtgagcagatcggcgacccggcgacgagcaagggcccggtggaacgccaggtggtgcgcattattacgccggggacggtgagtgacgaggcgctgctggatgagcgtcgcgataacctgattgcggcggtgttgggcgatgagcgtttgttcggcctgtcggtgctggatatcaccagcggcaacttcagcgtgctggagatcaagggctgggagaacctgctggcggagttggagcggatcaatccggtggagttgttgattccggatgattggccgaaggacttgccggcggaaaagcgtcgtgggaccaaacgccgtgcgccgtgggatttcgagcgtgattcggcgctgaaaagcctgtgtcagcaattctcggtgcaggaccttaaaggcttcggctgcgaaaccctgaccctggcgatcggcgccgctggttgcttgctcggttacgccaaggaaacccagcgcaccgccctgccgcatttgcgcagcctgcgccatgagcgcctggacgataccgtggtgctcgatggcgccagccgtcgcaacctggagctggacaccaacctggcgggcgggcgtgacaacacgctgcaatcggtggtcgaccgttgccagaccgccatgggcagccgtttgctgacccgttggctgaaccgtccactgcgcgatctgacggtgctgcaagcacggcagacttccattacctgcctgctggacggctatcgttttgaaaaactgcagccgcagttgaaagaaattggcgacatcgagcgcattctggcgcggatcggcctgcgcaatgcgcggccacgtgacctcgcgcgcctgcgtgacgccctcggcgccctgccgcaactgcaagaggcgatgaccgatctggacacgccgcacctgcaacagctggcggtgaccaccggcacctacccggacctggcggccctgctggaaaaagccattattgataacccgcctgcgatcatccgtgacggcggcgtgctgaaaaccggttacgacaccgagctggacgagctgcaatccctgagcgaaaacgccgggcagttcctgattgacctggaagcacgcgagaaagcccgcacgggcctggccaacttgaaggtcggctacaaccgcgtacacggctactttattgagttgccgagcaagcaggccgagtcggcgccgattgattatcagcgtcgccagacccttaaaggcgccgagcgctttatcacgccggaattgaaagagttcgaagacaaggcactgtcggccaagagccgtgccttggcgcgggaaaagatgctttatgaagccttgctcgaagacttgatcagccgcttggcgccgttgcaagacaccgcaggcgcactggcggaactggacgtgttgagcaacctggccgagcgtgcactgaaccttgatctcaattgcccgcgctttgtgagcgagccgtgcatgcgcatcgtgcaggggcgccatccggtggttgagcaggtgttgaccacgccgtttgtcgccaacgacctgtcgctggatgacgacacgcgcatgctggtgattaccggcccgaacatggggggtaaatccacctacatgcgccagaccgcattgatcgtgttgctggcgcacatcggcagctttgtgccggcggccagttgcgagttgtcgctggtggaccgtattttcacgcggatcggctccagcgatgacctggccggtggccgttcgacctttatggtggaaatgagcgagaccgccaacatcctgcacaacgccaccgaacgcagcctggtgttgatggacgaagtgggccgcggcaccagcaccttcgatggcctgtctttggcctgggcggcggccgagcgcctggcgcatctgcgcgcctacacgctgtttgccactcactacttcgaactgaccgtattgccggaaagcgaaccgctggtcgccaacgtgcatttgaatgccaccgagcacaacgaacgcatcgtgttcctgcaccacgtgctgccggggccggcgagccagagttacggcctggcagtggcccaactggccggcgttccgagcgaggtcatcacccgcgcccgagagcatctcagccgcctggaaaccacggcgctgccccacgaaaccgtggtcgcaagcccggtcaaagccaaaagcaagagcagcgcgccgcatcaaagcgatatgttcgccagcctgccccatccggtgctggatgagttggccaagcttgatctggacgacatgaccccgcgaaaagcgctcgaaatgttatatgcactgaaggttcggatataacgctgaggcttgcaagctggtagactctcgcgcggtttgggatgctgcgggcttttagcctggcctgcagactatcgctcccgaacctcgcgagccctggcacaaagggtttcgctgccgccgcctgaggagaaaattagaaatgaccttcgtcgtcaccgacaactgcatcaagtgcaagtacaccgactgcgtggaagtatgtccggtggactgcttctacgaaggcccgaacttcctggttatccacccggacgagtgcatcgactgcgccctgtgtgagcctgaatgcccggccgtcgccattttctccgaggatgaagtcccggcagagatgcaggaatttattcagttgaacgtcgagctggcggaaatctggccgaacatcactgaacgcaaggatccgatgccggatgcagcggaatgggacggtaaaaaaggcaagattgcagacctcgaacgctgatagcgtcgccgcccataaaaaaggccccttgcgggcctttttgcgtttctggaaaacaggtttcacttttcggcaggcaaaaaaaaggggcggtatgacccgcccacattttttccctagtccctgtattccttttcatcatcctgatgaatcgcatcctgcgacattccctgaaccatcgttccttgatggctgtgccaatccgtggacacagggctgatgttagagagttccaagggaagttcaacgggatccaggttgagggctgacagctttcgatgtgagacctggcataaataattgttacttttcaataagatagaaaagtctctcgcctttcttagtcgtacacacccggtaaaaaccccaaacacttacgaaaaagtaagcgaatgcttacacgcgcaattgcgtaaaagcgtaacagggccttgctggccgctcttcaggcatgaaaaagccccggcaatgccgaggctttttcgcttcagaggggtcagtcgtcgctgaccgtgatcgtcggcaccgccggtgcagccgcttcctgcagcacgatccgggcccccacgtggcgggccagttcctgataaaccatggcgaccgggctgtcaggctcggccaccacggtaggcttgccaccatcggcctgctcacgaatcagcatcgacaacggcaacgaggccagcaattcaacgccgtattgagtcgcgagcttctcgccaccgccctcaccgaacaggtgctcggcatgcccgcagttggagcagatgtgcaccgccatgttctccaccacgcccagcacgggaatgttgaccttgcggaacatctccacgccttttctggcatcgagcagcgcaagatcctgcggcgtggtcacgatcaccgaaccggctaccgggactttttgcgccagggtcagctggatatcaccggtgccgggcggcatgtcgatgaccaggtaatcgaggtcgccccaggcggtctgggtgaccagttgcagcaacgcgccggagaccatcggcccgcgccagaccatcggcgtgttgtcgtcggtgagaaaggccatggacatgacctcaacaccatgggcctcgatcggcacaaaccatttctgatccttgaccttcggccgcgtgccttcggcgatgccaaacatcacaccctggcttgggccatagatgtcggcgtcaagaatgcccacgcgcgcgccttcgcgagccagggccagggcgaggttggccgccgtggtggacttgcccacgccgcccttgccggacgccacggcaaccacgttcttgacgttggccaggcccgggatttgcgcctgggccttgtgggcggcgatcacacattgaatgtcgaccttggccgcacctacgccctcgagaccttcgatggccatttgcagcatttgcgcccagccgttcttgaacaggcctgcggcatagcccagttccaactggaccgacacctggtcgccctggacctcgatggcgcgcacacagccggcgctgaccgggtcctggttcaaataggggtcggtgtactggcgaagaacggcttccaccgctgcgcgattgacggcgctcatgggctactcccgaaaaaagactgactgaaacaggcggctatcctaaccgttccgacagcccagcggcatgctttcgaaggtctggaagatgctgaaacagcgtcacggggtgaaataaatttcccggcgctttatagtggccgacctccgtttcatcaagtagccgagccccatgtccgagccacgcaagatcctcgtcaccagcgccctgccctatgccaatggttccatccatcttggccatatgcttgagtacatccagactgatatgtgggtgcgcttccagaagcatcgcggcaatcaatgcatttatgtctgcgcggacgacgcccacggttcggccatcatgttgcgcgccgaaaaggaagggatcaccccggaacaactgatcgccaatgtgcaggctgaacacagcgccgactttgccgagttcctggtggatttcgacaacttccattcgacccactccgaggaaaaccgcgagctgtcgagccagatctacaagcgcctgcgcgacgccgggcacatcgacacgcggtcgatcacccagtatttcgacccggaaaagaaaatgttcctggccgaccgcttcatcaagggcacctgcccgaaatgcggcaccgaagaccagtacggcgacaactgcgagaaatgcggtgctacctacgcgccgactgacctgaaagatccgaagtcggccatctcaggcgccacgccggtgctcaaggattcccagcacttcttcttcaagctcccggatttccagcaaatgctgcaaacctggacccgcagcggcacgttgcaggacgccgtggcgaacaagatcgccgaatggctggatgccggcctgcaacagtgggacatctcccgcgatgcgccgtacttcggtttcgaaatccccgacgagccgggcaaatacttctacgtgtggctggatgcgccgatcggctacatggccagcttcaagaacctgtgtgaccgtacgccggaactggatttcgacgcgttctggaacaaggattccaccgccgagctgtaccacttcatcggcaaggacatcgtcaacttccacgccctgttctggccggcgatgcttgaaggttcgggctaccgcaagccaaccggcatcgccgtgcacggctatctgacggtcaacggccagaaaatgtccaagtcccgtggcaccttcatcaaggcgcgcacctacctggaccatctgtcgccggaatacctgcgctactactacgcctccaagctgggccgcggcgtcgacgacctcgacctgaacctggaagacttcgtacaaaaggtcaactcggacctggtcggcaaggtcgtcaacatcgccagccgctgcgccggttttatccacaagggcaacgccggtgtgctggtggctgaaaacgccgcgccggaactgactgacgccttcctcgccgctgcgccaagcatcgccgacgcctatgaagcccgcgactttgcccgcgccatgcgcgagatcatgggcctggctgaccgcgccaacgcctggatcgccgacaaggcaccgtggtcgctgaacaagcaggaaggcaagcaggcggaagtccaggcaatctgcgccacgggcgtcaacctgttccgtcagttggtgattttcctcaagcccgtgctgccattgctggctgccgatgccgaggcgttcctgaacgtcgcgccgctggcctggaatgatcacgccaccttgctgagcaaccaccaactgaacgagttcaagccgctgatgacccgtatcgacccggtcaaggtccaggccatgaccgatgcttcgaaagaagacctggtcgccagccagaccgacaccggtgagcccgcgcccgtcggcaacggcgaactggccaaagacccgctctccccggaaatcgagttcgacgcctttgcggccgtggacctgcgcgttgcgctgatcatcaaggccgaagccgtggaaggggctgacaagctcttgcgcctgacgctggacatcggtgacgagcagcgcaacgttttctccggcatcaagagcgcgtatccggacccgtccaagctcgatggtcggctgaccatgatgatcgccaacctcaagccacggaaaatgaagttcggtatttccgaaggcatggtgatggcggcgggccctggtggtgaagaaatctacttgctcagcccggacagcggggccaagccaggtcaacgcatcaagtaaatctgtaaaacagccctgccgttttgacggcagggcttttcagctagtcccctctttccgcttgccggataatcaggccctgtttgattgaccggcatacgcaatgaccaccccatgaacctgacacaacgtatcgacgcgctgctgccgcagacccaatgcggcaagtgcgggcacccgggctgcaaaccctacgccgagggcatcgcgcttggcgaggcgatcaacaagtgcccgccgggcggcgaggaaaccatcgccggcctggcgcaattactgcgcgtgccggtgctggaactggacaccagccgaggggaagctccggcacaggtcgcctatatccgtgaagccgagtgcatcggctgcaccaagtgcatacaggcctgcccggtggatgcaattgtcggcgccgccaagctgatgcacaccgtgatcatggatgaatgcaccggctgcgacttatgtgttgcaccctgccccgtggactgcattgaaatgcacccggcagccaccgtgctgccgattgtgggcggcctggcgaacaatgatcgacaacgccatgagcgcagcatcaaacgtgaccgggcgcggcgccgttatgaacaacgcaatgcgcggctgcaacgggaagaagctcaaaagctcgctgaacgcctggctcgggccaaactttcggaaccggcgttacccgtgcaggccagtaccgcccaggatgcagcggtcaagaaagccaaaatcacggttgcaataagtcgcgcccaattgcacaaatccttgaaagcgtttggtcacccgccaacctttgaacagcaatcgcagttgattgccctgcaacagcaattcgaagcagcggagcaagcgctggcggccctggaagtgcacaccgcaccgacggcagtaaccgcgaccggtaatactgccgacctgaaacgcgccaaaatccagctcgcgatgcgccgcgcggagctgaagaaagcccaggacttgaacgccggcccgcaacaactggcgcaggcgcagctcaaactcgacgaggcacagcaacaggtggatgcccacagcaacgcctgattcgcaaatcctgcggcgtgtattgctacaatcgcgccgaccgcctgcaaggaacccccaccccatgaacgccgcaaaacgcctggaaattttccgcaggtttcacgaggataatccggaacctaaaaccgaactggcctacaccacgccgttcgagttgctgattgcggtgatcctctcggcccaatccacagacgttggcgtcaacaaggccacggccaaactgtacccggtggccaacacgccagaggcgatttatgcgttgggcattgaaggcttgtcgcaatacatcaagaccatcggcctgtacaacagcaaggcgaagaatgtgattgaaacctgccgcttgctggtcgagatgcatggcggtgaagtgccacaaacccgcgaagctctggaagcgttgccgggtgtgggccgtaaaaccgccaacgtggtgcttaatacggcgttccggcaactgaccatggcggtggacacgcatattttccgcgtcagcaaccgcaccggcatcgcccagggcaagaacgtggtggaagtggaaaagcagttgatgaagtttgtacccaaaccctatctgctcgattcccaccactggctgatccttcacgggcgttatgtttgccaggcccgcaagccgcgttgcgggagctgccgcatcgaggacctgtgcgaatacaaggaaaagacgtctgacgattgagggatcattggttttttcgatcactcgattgaaaaaatcttttttacccattcatggattatcgttataaggagcgccaacggcagtcttagcctggagttaaccttatgagcactggcaaagaacaactggatgtagaggacgacctcgttgcggagtcggatgacgatggggaggcccctgttgcagaggtggccaagaccaatttgagcaaacgccgcactatcgacaacctgttggaagagcgacgcttgcaaaaacaactggccgattacgacttcgatctctgatcgacctgctgacgaccggaagcctccctgacggaggcttttttctgccggttactctggtgggatccggcccctagacgaggccattgcgttgggccagctcgatcaggtccaccagggagcgagcgttgagcttgagcagaaggcgagtcttgtaggtactcacggtcttgttgctcaaaaacatgccgtcagcgatttccttgttggttttgccacgggccagttgctgcagcaccatcatctcgcgcccggacaggcgctctaccatgtccgcttcactggcattgcccatggtggagcgcaccgagttgagcgcctggttcggaaagtagctgtaacccgagagcacggccttgatggcactcagcagctcggtcaggtcttgctgcttgcacacatagcctgccgcccccgcctgcatgcaacgcatcgaaaaatgcccgggggcctgggacgtcagcaccagtaccttcaccggcgcgggttgtttggcagacgccagccggcaaatcacttccagcccgtcgagcttgggtattccgatatccagaatgacgatgtccggtacatgttcccgtgcaagttgcaatgcatcgacaccgttatcagtctcggcaacgacttcataaccatgacgctccattagcatgcgcacagcaagccgaatgacgggatgatcatccacgatcagcactttattcatgagaaagtccaatttcgctgttcgaattatttagagcaaacacaatagcctagtcgctcgctagttggcatagcgatcccccccaagcaacagcaagcagagacccaacccacaaccgtatcggaataagcctacaaaaaaacactaactcggatgcgccttgctttatgaggcctttcagatatttccgggcttttaaatattttgcgcgaattaagtcacgtgcacagcgtgctgggtaaacgccccgtacgtgactttcaggaaaagcccattgcgtaacgttgccaggcgaatgatcccacggaaaacttccgactgttttagttccattcaacatattttcaaacctccttaattcctacagaattttcagtgcatttctggcgacctgtaaaaatgtagtgaaacttctgtaagacatagttcctatgaaggtgttagaaattcattcgattaaacaaaaacctcaacagataaattcagggctcaacaaaatataaacaccacaaaaatacaactaaacatgatgactggctcaaggccacgcgttaattacaggcaaaaaaaaatggccccttgaacaaggggccatttttcacaacgaggaatctatcagaacagcttgcggcccttgttggctgcaatgcgcatgcgcagggcattcaacttgataaagcctgctgcgtccgcctggttgtaggcgccgccgtcttcttcgaaggtggcgatgttggcgtcgaacagcgactcatcggacttgcggccagtaacgatcacgttgcccttgtacagcttcaggcgcacaacaccgttcacgtggacctgggatgcgtcgatcatctgttgcagcatcagacgctcagggctccaccagtaaccggtgtagatcaggctggcgtacttgggcatcagctcgtctttaaggtgagccacttcgcggtcaagggtgatggactcgatggcgcggtgggcacgcagcatgatggtgccgcccggggtttcgtagcagccacgggacttcatgcccacgtaacggttctcgacgatgtcgagacggccgataccgtgttcaccgccgatacggttcagggtcgccagcacagtggccggggtcatctcaacgccgtccagcgcgacgatgtcgccgttgcggtaggtcaattccaggtactgagccttgtctggagcgttctccggggagacggtccatttccacatgtcttcttcatgctcggtccaggtgtcttccagcacgccgccttcataggagatgtgcagcaagttggcgtccatcgagtacggggacttcttcttgccgtgacgctcgatcgggatcgcgtgcttttccgcgtaatccatcagcttttcacgggaaagcaggtcccactcgcgccacggagcaatcacttttacgccaggcttgagggcgtaggcgcccagttcaaaacggacctggtcgttgcctttgccggtggcgccatgggaaatggcgtcagcgccggtttcattggcgatttcgatcaagcgcttggcgatcagcggacgtgcgatggaggtacccagcaggtactcgccttcgtagacggtgttggcgcgaaacatcgggtagacgaaatcgcggacgaactcttcgcgcaggtcgtcaatgtagatctctttcacgcccatggcttgcgccttggcacgtgcaggttcgacctcttcgccctgacccaggtcagcggtgaaggtcaccacttcacagttataagtatcctgcagccacttgaggatcaccgaagtgtccaggccgccggaatacgcgagaacgaccttgtttacgtcggccatgccatcactccacggggttgtacggaaaggcgacgattctaccgaccaaaaccatgaaattacaggggcgcgacagcaaatgaagataaagcgacagattatgtcgagtgcgcgaccgatagccgcactttatgacgtgtgtgcagggttgcctggagtcgtggcctgaggcgccggtttttcgggaagggcgacacgttcaagctgaatattcacgcggcggttgcgcgcccggttggcagcgttggtgttgggggccagcgggtagctctcgccgtgaaagcgcatggttatctgcgattccgggatgccattttccttgaagtagtccgtcacggccagggcgcggcgacgcgagacgtcacggttggtcaggcgattgccactgttgtcggaatggccgttcaactcgatatggttaaccgtgggatcagctttcatgaacgcgacaatcaccgccagtttctttttggccgccgcatccagctcgatgccaccaccggggaacccgacttcagtctgtttgacctggtcgtaattcatcggcaataacttggtcgtgcacagttgatagtcgttgaaggccttgttgaatttcaccggtagcaggcgaatttccgagtagccgccttcgcgcccgtaatgccgcacggtcgggctgcgcccttcgagcaaaccactgaacagccgccccgcctgggcttgggaactgttgaaaagcacatcgccactgccgacacgcacagcgccaaggttgatatcaccacggcccggctgccaaggcgcagcggcggccagcaaggtggccgagcccgcacccaatgcgccgctgtaggctttgaggcggaacgtcgcctgctcgccggcccggcgcacgaactcacccgagccgaaatcggtgatcggctgggtcaggcggcactcgaactggtcgccttccaccttccactcgatgttctccagacgtgtctggaacgtgagggccatcgcaggcaggctggcgaacacactgagcagggctagataatgctggcgcacgggaggctccactggtttctacaacacttcaaagcgtcatacatcgttaaggcatacccagggatatcggacgcctgcagcaaaacttgatagcgagtgcctgcaagagtcttttccggtagcattcccaccagattgacccgcctggaatccccaatgtccgaccgcctgaccctgctgcgtcccgacgactggcatattcatcttcgcgatggtgctgcgttaccccaaactgtggccgatgtagcgcgcacgtttggccgcgccatcatcatgccaaacctggtacctccggtgcgtaatgccgagcaagccgacgcctatcgccagcgtatcctcgctgcgcgcccggccggcagccgcttcgaaccgttgatggtgctctacctgaccgatcgcacccagcccgaagagattcgtgaggccaaggccagcggctttgtctacgccgccaagctgtacccggcaggcgcgaccaccaactccgattccggcgtaaccagcatcgacaagatcctgcccgccatcgaagccatggccgaagtcggcatgccgctgttgatccacggcgaagtcacccgtggcgatgtggacgtgttcgaccgtgaaaagatcttcatcgacgagcatatgcgtcgcgtggtcgagctgttcccgaccttgaaagtggtgtttgaacacatcaccaccgccgacgccgtgcagttcgtcaacgaagcctcggccaacgttggcgcgaccatcaccgcgcatcacttgctctacaaccgcaaccacatgctggtgggcgggattcggccgcacttctattgcctgccgatcctcaagcgcaacacccaccaggtggccttgctggatgccgccaccagcggcagcccgaagttcttcctcggcaccgactcggcacctcacgcccagcacgccaaggaagccgcgtgcggctgtgccggctgctacacggcgtatgccgccatcgagctgtacgccgaggcgttcgagtcgcgcaatgcactggacaaactcgaaggcttcgccagcctcaatggcccgcgtttctacggcctgccggcgaacaccgaccgcattaccctggttcgtgaagactggaccgcccctgccagcctgccgtttggcgagttgactgtcatcccgctgcgcgccggtgaaacactgcgctggcgcctgctggaggaaagcaagtgagtgaagaccattacgacgacgaacacgagcacagtggtggcggttcccgtcatccgatggccgagcggtttcgcggctacctgccggttgtcatcgacgtagaaaccggtggcttcaactctgccaccgatgcgctgctggaaatcgctgcgaccaccatcggcatggatgaacagggttttgtgttcccggaacacactcacttctttcgcgtcgagccgtttgaaggcgcgaatatcgaagccgctgctttggaattcactggcatcaagctcgatcacccgctgcgtatggccgtaagtgaagaagcggcgctgaccgacatcttccgtggcgtgcgcaaggcgttgaaagccaacggctgcaaacgcgcgatcctggtcggccacaacagcagcttcgacttgggcttcctgaacgccgccgtagcgcggttggacatgaagcgcaacccgtttcatccgttttccagcttcgacactgccaccctcgccggcctggcttatggccagaccgtactggccaaggcctgccaggcagccggtatcgactttgacggtcgcgaggcgcattcggcccgctacgacaccgagaagactgccgagctgttctgcggcattgttaaccgctggaaagacatgggcggctgggaagacttcaacgactgaggctgacgcgtctgtggagcgaacttgttgcggcgagggagcttgctccctcgccacagaagctcggtcgccacagagtcaaatgcagcgcataaaaaaaccggccttctcaggccggtttttttgtacctcgaacctggcttacagcttgccagcgttctcggtcaggtaagccgcaacgccttctggcgaagcgttcatgcctttgtcgccttttttccagttggcagggcagacttcgccgtgctcttcgtggaattgcagcgcgtcaaccagacggatcagctcttccatgttacggcccagtggcaggtcgttgatgatctgggagcgaaccacgcctttgtcgtcgatcaggaacgcgccacggaacgccacgccgccttcggactcaacgtcgtaggccttggcaatgtcgtgcttcatgtcggcagccatggtgtatttgactttgccgatgccgccatcgttgatggcagtgttgcgccaggcgttgtgggtgaaatgggagtcgatggaaacggcgaccacttcaacgttgcgcgccttgaaatcgtccatgcggtggtccagggcgatcagctccgaagggcagacgaaggtgaagtccagcgggtagaagaacaccaggccgtatttgcctttgatggcttcagacagtttgaagctgtctacgatttcgccattgccgaggacggcaggtacgtcgaaatccggggcttgtttgccgacgagtacgctcattgggtttctcctgatgtgagggtgaagattgaagtaaaaggaccggcaccgagtctgccgctatcaagcgacagccctgtgacacaatcacgcttcgtgaagatcggccatcatacactgaaaaaaccgttcgtcagcgaaggcacggcgccatgcaatacgccgtgaatctactttgacaatcattctcgttaacattaagatccaacgcacttaagccttaaacccgcgacggttctcccttatgtatgtgtgcctgtgtactggcgtcaccgacggacaaatccgcgaagcaatctatgaaggttgctgcagctacaaggaagtgcgtgaaaccaccggcgttgccagccagtgcggcaaatgtgcttgccttgccaagcaagtggtacgggaaaccctgacgcagctgcagacagcccaggccgctctcccttattcagcagaatttacacacgcttaatttcgcatgttttaaagaaccgggcttaatgtccggtttttttatgcctgtaattcaattagttagcgccaagacgcggaacacaaacattcttattccgattaattttcatttattattcaataacttaggtttgacactcaggttttcgccgctcaaactctgcccatacacagctattacagggcaggaccccagtcatgaaaggcgacatctcagtcatccagcaactcaacaaaatccttgccaatgaactggtcgcgatcaatcagtactttctgcatgcgcgcatgtacgacgattggggcctggaaaagctcggcaagcgtgaatacaaagaatccattaaagccatgaaggacgccgatgcgctgatcaagcgcatcctgttcctggaaggcctgccgaacgtgcaggacctgggcaagctgaacatcggcgagcacactcaggaaatgatcagcagcgacctgaagttcgagcaaaaaatccacagtgacctcaaggccgccattgctcatgccgagacaaaaggcgacttcggcagccgtgaactgctggaagatatcctggaagaccaggaagaacacatcgactggctggaaacccaactgggcctgatcgacaaagtcagcctggaaaactatctgcaatcgcagatgggcgacgaataaaccctcggcactcaggtacaaaaaagccccgctctctttcgagaagcggggctttttattaccagcgaatcaagcgtcggtcttggccgccgcgtttgccgctgcgtctttgatcagcgcttgcagcgaaccatcagccgccatctcagtgatgatgtcgctaccgccgaccagctcaccggctacccacagctgtggaaaagtcggccagttggcgtacttcggcaggttggcgcgaatttcagggttttgcaggatatccacgtaagcgaatttctcgccacacgccatgatggcctgggaagctttcgcggagaaaccgcactgaggagcgttcggcgcgcccttcatgtaaagcagaatggtgttgttggcaatctgctctttgatcgtttcgatgatatccatggaacacctcggctggaactttgcgactcacaggtcggcacggtggcgcattgtaacgcaaaattccagcgcggtgctcgagccttatgcggcagccacctgcaccggaacgccgttcagcgcggcgtttccagacaattcgtcgagttgccgctcgtcggtcaggtcattcgcactcgcccccggctggccgctggcgatgctcatctgcacgcctggacggccgtgcccccaaccgtgaggcaggctgaccacgccgggcatcatgtccaggctggccatcacttccacttcgatcatgccgatacgcgaactgacgcgtacgcgctggccatcattgagctgacggctggccaggtcatcggggtgcatcagcagttggtggcgcggcttgcccttcaccagccggtgataattgtgcatccaggaattgttgctgcgcacatggcgccgaccaatcagcagcagctcgtcgcctaccggcgccggttgcgcggcaaaccgcgccaagtccgcgagaatcaccgccggtgccacttgcaccttgccatcagccgtcttcaaacgtgcggcaagattggcgctgagcggccccagatcaacaccatggggatgatccgccagcatctccactgacagtttgtgctcggaggcgtcaccgtaacgcccagcgcgcaacccgaagtcgatcatctgcgcaggcggcacggtcggtttaagcgccgcgcctgtctgcgctgcaaaggctttggccaagccgacgaaaatctcccagtcatgcagcgcgccatcgggtttgggcagaatcgcgcggttgaaacgcgtgacgttgcgaaccgcaaacatattgaacgtggtgtcgtaatggtcgttttccagcgccgacgtggatggcaggatcaggtccgcataccgagtggtctcgttgatgtagaggtcgatgctgaccatgaactccaacccgtccagtgcctgctccagttgccgcccattcggtgtcgacaacaccgggttgcccgccactgtcaccagcgcacggatttgcccttcgccttcggtgagcatttcttcagccaaagtggacaccggcaactcgccaccgtattcagggcgacccgacacccggctttgccagcgattgaaatgcccgccacccgtcgatgccaccaaatccacggcgggcgaggtgcacaaagcaccaccgacgcgatcaagattgccggtgaccaagttgatcaactgcaccagccaatgacacaaagtaccaaacgcctgggtcgagacgcccatacgcccgtagcacaccgccttgtccgctgcagcaaagtcccgcgccagttggcggatctgctcggcgggcactgcgcattggtggctcatggcctcggcggtaaacccggcaaccgcatggcgcacttcatccagcccctcgaccggcaggtggctgtcacgggtcaaaccttcgctgaacaacgtgttgagcacgccgaacaacaatgccgcatccccaccgggacgcacgaacagatgctggtctgccatcgccgccgtttcgctgcggcgcgggtcgaccaccaccaccttgccaccccgggcctgaatggctttgaggcgcttctccacatcgggcacggtcatgatgctgccgttggacgccagcgggttaccgccaaggatcaacatgaagtcggtgtggtcgatgtccggaatcggcagcagcaggccatggccgtacatcaggtagctggtgaggtggtggggcaactggtcaacggaagtcgcggagaaacgattgcgggtcttgagctggcccagaaagtaattgctgtgggtcatcagcccgtagttatgtacgctggggttgccctgatacacagccactgcgttctgaccatgcttggcctggacactcgccagccgctgggccacgagagaaaatgcatcttcccacgcaattggccgccacgcgctgccctcgcgcaacatcggctggtgcaggcgatcagtgtcgttctggatatcctgcagcgccacggccttggggcagatatgcccgcggctgaaggcgtcctgcgggtcgcccttgatcgaggtgatcgtcaggctaccgtcgtcggcctgggtggtttccagggtcaggccgcaaatggcttcacacagatggcaggcacggtggtggagagtcttggtcatggccagtctctttatcagggctttgacttcactatgggccgcgaccgaaggcgacaccactaacgttcgccccgtgaatcgaacggcatcaggccaaggcatggctaagcgtgagcaaatgtttcaaaaccctcccgctagcctctgaaaccgacgcagtctggcctgggcccgcccccgcgcattgcaaaatatctcgacgccagtgtacaaatgacccgctgctgtctggaaatagtcttcaaaagcgctcaggcgcccctcttgaacacccttaaaaaccgtagccctattggtaagacgcgacatttaattataagatcgcgccttcccctatttcgtcgccccgtgcggctttcgccgcaggtctcgcccgttgtcacaataaacaaggctttgagtatctgcggtctgttgcaaaaaggtagttaatgatgagcgcaaggcactttctctccctgatggattgcacgcccgaagagctggtcagcgtgatccgtcgaggcattgagcttaaagacctgcgtaaccgcggcgtactgttcgagcctttgaaaaaccgtgtgctcgggatgattttcgaaaagtcgtcgactcgcacccgtgtgtcgttcgaagccggcatgatccagctcggcggccaggccatcttcctgtcttcgcgcgacactcaactgggccgtggcgagccggttgccgacagcgccatcgtactgtcgagcatgctcgatgcggtcatgatccgtacctttgcccacagcactgtcaccgaattttccgccaactcccgtgtgccggtgatcaacggcctgtccgatgacctgcacccgtgccagttgctggccgacatgcaaacctttcttgagcaccgtggttcgatccagggcaagaccgtggcctggatcggcgacggcaacaacatgtgcaacagctatatagaggcggcgatccagttcgacttccaactgcgcatcgcttgcccggaaggttacgaacccgacgcacgcttcctggaacaggccggtgaccgcgtcaccgtggtacgcgacccgcgtgacgcagtgatcggcgcgcacctggtgagcaccgacgtgtggacgtccatgggccaggaagaagaaaccgccaagcgcctggcgctgtttgcgccgttccaggttactcgcgcactcctcgaccttgccgcgccggacgtgttgttcatgcactgcctgcctgcgcatcgtggcgaagaaatcagcctggacctgctcgacgacaaacgttcggttgcctgggaccaggctgaaaaccgcctgcatgcgcagaaagcgctgctcgaattcctcgtgccaccgtcgtaccaccacgcatgagccagccattactgctgaacctgcgcaatctggcatgcggctatcaagatcaacgggtggtacagaaccttaatctgcacctaaacgccggcgatatcggttgcctcctgggctcctcaggttgtggcaaaacgaccaccctgcgtgcgattgccgggtttgagccggtgcatgaaggtgagatcagtttggccggtgaagtgatctccagcgcaggtttcaccctggccccggagaaacgtcgtatcggcatggtgttccaggactatgcactgtttccgcacctcagcgtggccgacaacattgccttcggcattcgcaagcatccgcagaaagaccgggtggtcgccgagttgctggaactggtcaacctgaaaaacctcggcaagcgcttccctcacgaactgtccggcggccagcaacaacgcgtcgccctcgcccgcgccctggcgccggagccacaactgttgctgctggatgaaccgttttccaacctcgacggcgagctgcggcgcaagctcagccatgaagtgcgcgacatcctcaaggcgcgaggcaccagcgcgattctagtcacccacgatcaggaagaagccttcgccgtgagcgatcaagtcggggttttcaaggaaggccggctggaacagtgggacacaccctacaacctgtatcacgaaccgcagacgccttacgtcgccagctttatcggccagggctacttcatccgggggcaactgagctcgccggaatcggtgagcaccgaactgggtgatttgcgtggcaatcgtgcttacacctggccgacgggcggcgcggtggatgtattgttgcgtccggatgacatcgtttatgcgccggacagttcgttgaaagcgcggattgttggcaagacgtttctgggggcatcgactctgtaccgtttgcagttgccgacgggggcgcagctggagtcgattttcccgagccatgcggatcatcaggttggcgtggatgttgggattcgggtggcggcggaacatctggtgttgtttcaggcttcaggcagtacggccgcgcagattcctcagagcgaatccggcgtgcgccgctacagcccggcccactgatcccgaacgaaacggaatcaaaaatgtgggagcgggcttgcccgcgatgatggtgggtcagtcagctaattgttaggttgacacaccgccatcgcgggcaagcccgctcccacattggatttttatagacttcaaaagtggagctcagacccggcctatttctgcaaactttgcctgtgtatgctcagccaacaccgacgccggcaattccacttccagcccccttctccccgcactcacaaaaatcgtcgcaaacggctgcgccgtcacatcaataaaagtgcgcaaacgcttcttctgccccaacgggctgatgccgcccaacaagtagcctgtggaacgttgcgccgcagccgggtcagccatctcggcctttttcaccccggcagcctgcgccaaggcttttaaatccaggcttccgacgaccggcacaacggccaccaacaattcacctttctcactgctggccagcagcgtcttgaatacctgcgccgggtcgaggcccaatttttccgcggcctccagaccatacgaggcagccttggggtcgtgttcataactgtggatgcgatgttcggcgcgaacttttttcaacaggtccaatgcaggggtcatgaagtctccaggcagggcaaacagaggatcaattctaggcgaaggccacacaaaaggctctagtacgcgcgctcgaaagactaataccttgcgatccatgcgtgatcattcaccagacctatagttcgaaaatgaccgatcgttcactttcgacctttgacagccgtcattcttgtctatattttttcgtttccgaatactgtaggaatagcaccgcagtactccagcagtaagctgcggcctggatggggatcctggtcacggtgaaaatcgcgcaacaacacgttgaggttgtgcgccagacaagaacaacaattgaggttttccatgacaactgctcttcaacagccttcactttcgagccaatgcatggccgaattcctggggacggctctgctgatcttcttcggtaccggatgtgtcgctgcgctcaaggtcgcgggtgccagctttgggctgtgggagatcagtatcatctggggggttggcgtcagcatggcgatctacctcagcgccggcatttccggggcgcacctcaacccggcggtcagtatcgccctgtgcatctttgccgatttcgaaaagcgcaaactgcccttttatattcttgcccaggtcgccggcgctttctgctcggcggcgttggtgtatacgctctacagcaacctgtttttcgattacgaacaaacccaccacatggttcgcggctcccaggccagcctggaattggcgtcggtgttctccacctacccccacgcgctgctgagcactgcgcaagccttcctggtggaagtggtcatcaccgctattttgatgggcgtgatcatggcgctgaccgatgacaacaacggcctgccgcgcggcccgctggccccgctgctgatcggcttgctgatcgcggtgattggcagtgccatgggcccattgaccggttttgcgatgaacccggcacgggatttcgggcccaagctgatgacctttttcgccggctggggtgaaatggcctttacgggcggtcgcgatattccttacttcctggtgccgattttcgcgcccattgtgggcgcatgccttggcgctgcggcctatcgcgggctgatcgctcgccacctgccgagcgcggcacctgctatagatgaagaaacacctgacacggctgtcaacggcaacacgcgtatttcctgatcacacccgcctggtgcccactgcccttttgcggcccaggcggattacttacttctttatttccgtgcaaggcaatcgacatgaccgacattcagaataagaactacatcattgcccttgaccagggcaccaccagttcgcgggcgatcatctttgatcgggacgccaacgtggtctgcaccgcccaacgtgaattcactcagcactacccgcaagccggctgggtcgagcatgacccgatggaaattttcgctacccagagcgcggtgatggtcgaagcgctggcccaagccggcctgcaccatgatcaggtcgccgccattggtatcaccaaccagcgtgaaaccacggtggtgtgggacaaagtcaccggccgcccgatctacaacgcgatcgtctggcagtgccgccgcagtaccgagatctgccagcagctcaagcgcgacggccacgagcaatacatcaatgacaccacgggcctggtcacagacccttacttctccggcaccaaactcaagtggatcctcgacaacgttgaaggcagccgcgaacgtgcgcgcaacggcgagcttctgttcggcaccatcgacagttggctgatctggaaatttaccggcggcaaaacccacgtcaccgactacaccaacgcctcgcgcaccatgctcttcaacatccacaccctggagtgggatgcgaagatgctggagatcctcgacgtaccgcgcgaaatgctgccggacgtgaaatcgtcctcggaaatctacggccgcaccaaaagcggcatcgccatcggcggtatcgccggcgaccagcaggcggcgctgttcggccagatgtgcgtggaagcgggccaggccaagaacacctacggcaccggctgtttcctgctgatgaacacaggcgacaaggcagtgaaatccaagcacggcatgctcaccaccatcgcctgtggcccgcgcggcgaagtggcttacgccctggaaggcgccgtgttcaacggtggttccaccgtgcagtggctgcgtgacgagctgaaaatcatcgccgacgcgaccgacaccgaatacttcgccggcaaggtcaaggacagcaacggcgtgtacctggtcccggccttcaccggtctgggtgctccgtactgggacccctatgcccgtggcgcactgttcggcctgacccgtggcgtacgcgtggatcacattattcgtgcagccctggagtcgattgcctaccagacccgcgacgtattggacgccatgcaacaggattccggcgagcgcctcaaggccctgcgcgtggacggcggcgcggtggccaacaacttcctgatgcagttccaggccgacatccttggcacccaagttgagcgcccgcaaatgcgcgagaccacggcgctcggtgctgcctacctggcaggcttggcgtgcggtttctggggcagcctggacgagttgcgcggcaaggccgtgatcgagcgcgaattcgaaccgcaactggatgaagccgccaaggaaaagctctactccggctggcaaaaggcggtgagccgcacccgtgactgggaaccgcacgaaggcgctgaataagccaagcgccggacctatatagggttgtaactggcagggagcagattcctgcgtcatcatgggccacttttgtatggcagcccaaaggacgccccatgaatctgcctccccgccaacaacaaatcctcgagctggttcgcgaacgcggctatgtcagcatcgaggaaatggcgcagctgttcgttgtcaccccgcaaaccatccgccgcgatatcaaccaactggcggacgccaatctgctgcgccgctaccacggcggcgcagcctatgactccagcgttgaaaacaccgcgtacgccatgcgtgccgaccagatgcgcgacgagaaacagcgcatcggcgaagccatcgccgcgcaaatccccgaccacgcctcgctgttcatcaatatcggcaccaccaccgaatccatcgcccgtgcgctgctgaaccacaaccacctgaaaatcatcaccaacaacctcaacgtcgccaccatgctcagcgcaaaggacgattttgatgtgttgctgaccggcggcaatgtgcgccgtgacggcggcgtggtgggccaggccagcgtcgactttatcaaccagttcaaggtcgactttgcgctggtgggtatcagtgggattgacgaagacggcagcctgctggacttcgactatcaagaggtgcgggtttcccaggcgatcatcgctaatgcgcgccaggtgatcctggcggcggattcgagcaagttcgggcgcaatgccatgattcgcttggggccgatcagtttggtggattgcctggtgactgaccagcagccggtgccggcgttggtgcagctgttgaaccagcacaaggtacggctggaagtggtttagcgcctgtactgacgctatcgcgggcaagcccgctcccacagtttggaatgcgatcaactgtgggagccggtcttgcccgcgatagcggtctgacaggcactccattccccacgatgttcacaattcttcctttccccgcccttcgatgagttttttcaatcgaagtcgggtggctgcgcgcgcgtttatcggctaccattttcgcaaatgaacattaatgttcgaattccaagacgaaaagatcgcgaggccagccgatgaacccttccaccttgcctgccccaccgcttgccgaagtctatgacgttgccgttatcggcggcgggatcaatggcgtcggcattgcagcagacgcagccggtcgcggtttgtcggtattcctttgcgaaaaggacgacttggccagccatacctcttcggccagcagcaagctgatccatggtggcctgcgttacctcgaacattacgaattccgcctggtacgcgaagccttggccgagcgcgaagtgctgctggccaaggccccgcacatcgtcaaacaaatgcgtttcgtgctaccgcaccgcccgcacctgcgcccggcgtggatgattcgcgcgggcttgttcctgtacgaccacctcggcaagcgtgagaagctggcaggttcgaaaagcctgaagttcggtgccgacagccctctgaaaagcgaaatcaccaaaggcttcgaatactccgattgctgggtggatgacgcccgcctcgtcgtgctgaatgccatggccgcccgcgaaaaaggcgcgcatatccacacccagactcgttgcgtcagcgcacaccgcagcaacggcatgtgggaaatgaacatggaacgcgccgacggcagcctgttctcgatccgcgcccgtgcgctggtgaatgcggccggcccatgggtcgccaagttcatcaaagacgacctgaagctggattcgccgtatggcattcgcctgatccagggcagccacctgatcgtgccgcgactgtacgaaggcgcccacgcgcatatcttgcaaaacgaagaccagcgcatcgtcttcaccattccgtacctcaaccacctgacgatcatcggcaccaccgaccgcgaatacactggcgacccggctgcagttgcgatcacagaaggtgaaaccgactacatgctcaacgtggtcaatgcgcacttcaagaaacaactgagccgcgacgatatcgtgcatacctattccggtgtgcgcccgctgtgcaacgatgaatcggacaatccgtcggcaatcacccgcgactacaccctggcattgtccggcggcaacggcgaagcgccgatcctgtcggtgtttggcggcaagttgaccacctaccgcaagctcgccgagtcggcgatggcgcagctggcgccattcttcacgcagatgcgtccgagctggaccgccaatgcgagcctgcctggcggtgagaacatgacgacgccagaagccctggccgacgcgattcgcgccaagttcgactgggtaccgagcgagatcgcccgtcgttggtccaccacttacggcagccgcacttggcgcctgctggaaggtgtgcaatcactggcagacctgggcgaccacctgggtggcggcctgtacacccgcgaagtcgattacctgtgcgccgaagaatgggcgaccaaacctcacgacgtattgtggcgccgtaccaagctcggcctgttcaccacgccgcaggaacaggaaaacgtgcagcgttacctgtccacagtcgaactgacccgtgcaaagattgaagcggcctgatcaaccacaggttcgtgccgcatacagcaaagcccctgcaccgaaaggtccaggggcttttttatggggcgagggattgacgttgatagcgcaggcccatttcgcgaatttcgcaggaggccgagcccaacaacacgggatacgccgcttgcagaaacccgggcgttgccgacgtcagcgcccgctccagccaggcacaggcttgcgccgtgtcccccgcttccgccagttccgcggcatggttgtattgcccgcgaaaatctccgccctcagctgcgcgctgataccactgccgcgccagttgaaggtcctctggcaccacaacgccctcatggtggaagcgcccgagcaggttcatcgacttggcgtgacccttggcggccgcctggcgaaacagctcgtaagccgctgccagatccttctccaccccccgaccacgcgtcaacaattggccgtagttgtagagcccccaatccaacccaaggtcagcggcttgccggtaatgccgcgccgcctccttcaaatcgatatcgctgccccagccattctccaggcaacgcccaatcatgttgatcgccatcggatggcgttgccgggcagcaatgcggaaccagctcagcgccagttgcgcatctttctgcaccccccgaccgtccagcaatagctggcccaaggtcgcctgtgcatcggcatcaccgagttgcgcggcatgcatgacccaacgcacataagcgcgcggattaccgccgatctcagacacttcattgtctgcctgcccactctgcatccgcgccccgcatgcgatccgggatcgcaaaaatttcatgaattatttcgttacaaactattacatttgagatcgtttatcaattacgatcgcctctcactttcacccacacgagaatattcaatggctaccgggatcagttctgcccccctttcatcgcggcatttgctcgcgtcggcggtgggtttggcagtggctgcgcagggaggtttcagttatgcagcggagactgcagcagatgacaacacaggcgtaatccagctcggcgcgaccagcattgaaggtcaagcccaaagcacaagcacttacaaccctgtggccccctcttcccccaagtacaccgaagcgctgcgcgacaccccgcagacgatcacggtcgtgcccaaggaagtcattcatgaccagaacctgctgaccctgcgcgacgtgctcagcaccgtgccgggcatcacctttggtgccggtgaaggtggcagtggttatggcgacagcatcaacctgcgcgggttttccgccagcggtgacatctacgtcgatggcgtgcgcgacagcgcgcaatacagccgcaccgaccccttcaacctggagcaggtcgaagtcgtcagcggcgcaagctcggtgtactcgggttcgggcgcggtgggcggcaccatcaacctggtgaccaagcagccggagttgcgtgacaaaaccaccgtcagcgccggtattggcaccgatagctacaagcgctttaccctggactccaacagccagctcaacgacaccacagcatttcgtttgaacctgatggcccatggtaacgacgtgcccggccgcgattatgaagattactcgcgctggggcattgccccctccatcgcctttgggctgggtacgccaacccgcgtgaccgtcagctatgagcaccagaaagacgacaacacaccgcaatacggcatccccatctacaacggcaagccgatgccgggcgtgggctggagtgatttctacggctatcacaacatcaatgaccagcagatcacctcggatgcgttcagcctgaagctcgaacacgacttcaatgattccgtgtccgtgcgcaacttcagccgcgtcgagcgggtgcgccaggaattgcgcgcctcaggccccgaaggcgcccaggccggctgcctggcaagcggtacccagatcaccggcgcgccctgccccacaggcctgacccccggtttcttccagcccgccggtggctcactgggtaacgagcgcaacacccagaacaaaatgttcaccaaccagaccgacgtgaccagccgcttcagcaccggtttcatcgaccacacgctggtgaccggtattgcgatcagccgcgaggaataccaggcagacaccggcaaatggctgaccaacagcaatggcaccgcgatcgttccgccgccggtcagcttcagcgacccgaactccgactggacaggcccggtcaacttcacccgtgccgcccacgtcgacggcgcactgaacaaccgcgccgcctatgccttcgataccctcaagctcaacccgcagtgggaaatcaacggcggcctgcgttacgagcacaacgctggcagttccgtgaccaatgcctattcgcccaccggagtggaaacgcccggtacgcgcttcggtcaagcggatgacctgacctcctaccgcctggctctggtctacaaaccggtggaaaacggcagtttctatatcgcctacggcaacagcaagacgccgtcgcaagccagcgtcaacgggggctgcttcaccccggccaaaacctccagcgcagccaccaacaactgcaacgttgctccggaaaccgccgtcagctatgaaatcggcaccaagtgggacttcctcgacaatgccctgtcagtcaccggtgcgattttccgcaatgaccgcaccaactacaaagtcgccgaccccgaccccaccaacctcagcggctcgcaatcgctcgacggcaaagcccgcgccgacggcgtagccctgggcctgagtggtgcgatcacagagcgctggagggtcttcgccaactacacctacctggacacccgcgtactgcgcagcgccagcgactttaccctggcaaccaccggctttgacgcgcagaaaggcgagcccctgccgttcacgccaaaacacgccgccagcctgtggacggtgtacgacctgccgtacgacttccaggtgggctacggcatcacggcgcaatccaagcaatacctggtcagcgccgccggggcaccgacggcacctggctacgcagtgcagcgtgcgatgctcggttataaggtcaacaaacaattgaacctgcagttgaacgtcaacaacctgttcgacaaggaatacctgacccgcatccgcaacaacggttgggcggtaccgggtgatggtcgtgcagcggtggtttcggctgactacaccttctgatttcaccgtccaccctgtgggagttggcttgcctgcgatgcatgcacctcggtttgtctgaatgaccgcggcgatgccatcgcaggcaagccagctcccacaaacactcgccacaccattcggttttccgaacgccacttcccacgccattcggttaaccggatcggctcgatacgaaactgccgtaacagaaacttaatctccttataaatcagccatataaccttttatttcgggtatggcacgactcatgctctacactccctgacgattgcctgagacgcctcaggagccgttacgggcattcgctgtacaagagagccgcttagccggcttcataaaaaaaacaaatgtcgaggaagtattgatgcgcatcgttccccatatcctgggcgcagctatcgctgctgctctgatcagcactccagttttcgccgccgaactcaccggcacactgaagaaaatcaacgactccggcaccatcaccctcgcgcaccgcgacagctccattccgttttcctacatcgcggacggttcgggcaaacctgtgggctactcccacgacattcagttggccatcgttgaagccctgaaaaaagacctgaacaaacccgacctgaagaccaagtacaacctggtcacctcgcagactcgtatcccgttgatccagaacggcaccgctgacatcgagtgcggctccaccaccaacaacgccgaacgcgcccagcaagttgatttcaccgtcaacatcttcgaaatcggcacccgcctgctggtcaagaaagacaaggatggcaagccgtcctacgctgactttgccgacctgaaaggcaaaaacgtcgtgaccaccgccggcaccacgtccgagcgcatcatcaaagcgatgaacgccgacaagcagatgggcatgaacgtcatctccgccaaagaccacggcgaatccttccagatgctggaaagcggccgcgccgttgccttcatgatggacgacgccctgctggccggtgaagaagccaaggccaagaagccggacgactgggtcatcaccggcactccacagtccttcgaagcctacgcgtgcatggtgcgtaaagacgacccggccttcaagaaggctgtggatgacgccatcgtcgccctgtacaagtccggcgaaatcaacaagatctacagcaaatggttcgagagcccggttccgccaaaaggtctgaacctgaacttcccgatgagcgaaaaagttaaagacctgatcgccaacccaagcgacaagccggcgccagacgtaaaaatctgatacctgactaagcttatcccctgagggagccaaccctccctcaggcgtctgttactacctgctggctttaatgtggaacactcgacctggcggttttcgagccgatcgcgtgtgcctggcgttcaccgtcaggcgggaaaggatcttccccaagcgggtgcttgtacatcgatcgatctcgaggggagaccctaatgaattacaactgggactggggcgtgttcttcaagtccaccggcgttggcagcgagacttatctcgactggtacatcgccggcctgggctggaccattgccatcgctgtcgtggcatggatcatcgccttgttgcttggctccattctgggggtcatgcgcaccgtgccaaaccgcatcgtatcgggcatcgcgacctgctacgtggaactgtttcgtaacgtgccgctgctggttcagctgtttatctggtacttcctgatacccgacctgctgccgcaaaacctgcaggactggtacaaacaagacctcaacccgaccacctcggcctacctgagcgtcgtagtgtgcctgggtctgttcaccgccgctcgtgtctgtgagcaagtgcgtaccggtatccaggcgctgccacgcggccaagagtccgccgcgcgcgccatgggcttcaaactgccacagatctactggaacgtgctgttgccacaggcctaccggatcatcattccgccgctcacctcggaattcctcaacgtgttcaagaactcctccgtggcgtccttgatcggcttgatggaactgctggcccaaaccaaacagaccgcagagttttcggcgaacctgtttgaagccttcaccctggccacgctgatctacttcaccctgaacatgagcctgatgttgctgatgcgcctggtcgagaagaaagtcgcggtgcccggcctgatctccgtggggggtaaataatggacttcgatttcagcggcatcatccccgccatgcccggcctgtggaacggcatgatcatgaccttgcagttgatggtcatgggcgtaatcggtggcattgcattgggtaccgtactggcgctcatgcgcctggggtccaacaaactcctggccaacctggccggcgcttatgtgaactacttccgctcgatcccgctgctgctggtgatcacctggttctacctggcggtgccgttcgtgttgcgctggatcactggcgaagacacgccgatcggcgcgttcacctcctgcgtcgtggccttcatgatgttcgaagccgcgtacttctgtgaaatcgtgcgggccggcgtgcagtcgattcccaagggccagatgggcgcagcccaggcgatgggcatgacatatggccagaccatgcgtctgatcattttgccccaggcgttccgcaagatgacccctttgctgctgcaacagtcgatcatcctgttccaggacacctcgctggtctacaccgtgggcctggtggacttccttaactccgcccgctccaacggcgacatcatcggccgctccaacgagttcctgatcttcgccggtgtcgtctacttcatcatcagcttttccgcctcgctgctggtcaagcgtctgcaaaaaaggtttgccgtatgatctctatcaagaacatcaacaagtggtatggcgacttccaggtgctgaccgattgcagcactgatgtcaaaaaaggcgaagtgatcgtggtgtgcgggccgtcgggctcgggtaaatccaccctgatcaagtgcgtcaacgcgctggaaccgttccagaagggcgacattgtggtcgacggcacctccatcgccgacccgaaaaccaacctgccgaaattgcgctcgcgcgtgggcatggtgttccagcacttcgaactgttcccgcacctgaccatcaccgaaaacctgaccattgcgcagatcaaggtgctgggccgcagcaaggaagaagccaccaagaagggcctgcaattgctcgagcgcgttggcctgtcggcacacgctcacaagcacccgggccagctgtccggcggccagcaacaacgtgtggccatcgcccgcgccctggccatggacccgatcgtcatgctgttcgacgaaccgacctcggcgctggacccggagatggttaacgaagtgctcgacgtgatggtgcaactggcccacgaaggcatgaccatgatgtgcgtgacccacgaaatgggcttcgcccgcaaagtggccgatcgcgtgatcttcatggacgccggcaagatcatcgaagactgcccgaaagaagagtttttcggcgacatcagcgcccgctccgaacgcgcgcagcacttccttgagaaaatcctgcagcactaagcattacagcgcttccactgtagaaaccgcgcccatgtgggagcgggcttgtgtgggagctggcttgcctgcgatggcatcacctcggtacccctgtgacaccgaggcgtctgcatcgcgggcaagcccggctcccacaaaagccaggccccacacaaacaggtccatgccagggctggcaagctctggttgacccaaggcatctgtgatgaaatgcgaccccaaccaatttcgcgccgcaccgccatcacttgccgtgaaaccacgcctgattcgccaactgttcctgccgccactgatcatcgccctgatgatcggcctgggttatatcggcttttgggtcagtgagtactatggcatccgcaccctcaacgacactggcgaacgccagctggagttgcatgcccgcaccgtcgaaagcgaactgagcaaatacacctacctgcccagcctgctggaactggagtccagcgtctccacgctgctggccgacccgagccaggaaacccggcaaccggtcaatgattacctcgaaggcttgaaccgccgcagccgcagccgggccatctacgtgatggacaccaccggccgcgtactggccaccagtaactggcgcgacgccgacagttaccagggtgaagacctgtccttccgcgcctatttccaaaatgccgtacgcggccagcccgggcgtttctatggcgtgggcagcaccaacggcgaagccggttactacctggcccacggcctggaagaacacggcaagatcatcggcgtggccgtggtcaaagtgcgcctggaagccctggaagaacgctggcagcgcgcgcgtctcgaggcttttgtcagcgacgagaacggcatcatcattctgtccagcgacccggcccgccgcctcaaggccgtacgccctctgagcgacgaaaccaaggaacgcctggcccacagcctgcaatattactgggcgacgctgaacgaactggagccgctggcccgcgagcgcctcaacgaaggtaccgagaaactgaccttcccggccaacagcgaagtggtcaacgacgaacacgaagtcagctacctggcgcaaacccgcccgcttaccgacaccccgtggaatttcaccctgctcacgccgctcaatgacctgcgtcgcgcggcgatcaaccagggcatcctggtggcggtcgcgtttggtctggtcgcgtttttgctgattgcctggaacgagcggcgcaaggtcatcgccactcgcctggccgcgcgcgaggccttgcaggaagccaacagccagctggaacggcggattgccgagcgcaccgccgacctgcgcgccagcaacgaacggctcaagagccagatacgcgaacggcgccaggccgaagaaaccctgcgccacgcccaggatgaactggtacaggccggtaaactggcggccatcggtcagatgtctaccagcatcgcccacgaattgaaccagccgcttgcggccttgcgtacgctatcgggcaacactgtgcgcttccttgagcgtggcgccctcgataccgccagcaccaacctcaagaccatcaacgaactgatcgaccgcatgggccgcatcaccgccagcctgcgttcgtttgcccggcgcggcgacgaccagggtgaagccaacctcggcaaagccgtggatgccgcgtttcaagtgctgggcgcgcgcctggacggcctgtcattgaaggtgaaccgcgacttcgccaacgcccggttgcagatcgaccagacgcgcctggagcagattctggtcaacctgatcggcaacgccctcgacgccatgcaggcgcaaccagcccccgaactgtggctggacggccacagcgttgacgacaagtaccgcctgcaagtacgcgacaatggccacggtatcgaccccgaggcgcgcaagcatttgttcgaaccgttcttcaccaccaagcccggcgagcaaggcctgggcctgggcctgaccctgtccgccagcctcgcggcggccaccggcggcaacctcgccgtggaacacccggccagtggtggtactgcctttgtcttgtgcctgccgctggcgggcactcaaaaagctgagtcgacatgaatacagattcgaaagacctcaccgtcctgatcgtcgaagacgacccccatgtactgctcggctgccagcaggccctggcactggaagacattcccagcgtgggcgtgggcagtgccgaagaagcgctcaagcgcatcggcgagaactttgccggcattgtcatcagcgatatccgcctgcccggcatcgacggcctggaactgctgacccgcctcaaggccctggataaaagcctgccggtggtgctgatcaccgggcatggcgatatctccatggcggtgggcgcgatgcgcaacggcgcctacgatttcatggaaaaacccttctcccccgagcgcctggtcgacgtggcgcgccgcgccctggagcagcgcgggctggcgcgggaagtctggtcgttgcgtcgccaattggccgagcgcgactccctggaaggccgcatcatcggccgctcgccggccatgcagaacctgcgcgagctgatcgccaacgtggccgacacctcggccaacgtactgatcgaaggcgaaaccggcaccggcaaggaactcgtcgcgcgctgcctgcatgattttagccggcgtcactcgcaccaattcgttgcgctgaactgcggcggcctgccggaaaacctctttgaaagcgaaattttcggccatgaagccaacgcctttaccggcgccggtaaacgccggatcggcaagatcgagcacgcccacgaaggcacactgttcctcgatgaagtggaaagcatgccgatcaacctgcagatcaagctgctgcgggtgttgcaggagcgcaccctcgaacgcctgggctccaaccagagcgtggcggtggattgccgggtgattgccgccaccaagtccgaccttgacgagctgagccgcgccagccaattccgcagcgacctgtattaccgcctcaatgtggtcaccctggaactgccacccctgcgcgaacgccgcgaagacatcctgcacctgttcgaacacttcctgcagcagtcctcgctgcgctttgaccgcagcgtgccggagctggataaccagacggtgtcgacgctgatgagccacgactggccgggcaacgtgcgggaactgcgcaacgtcgccgagcgctttgccctgggcctgccagccttcaagaaaagcggcgccggcgccagcaaccacggcctggcgtttaccgaagcggtggaggcatttgaacgcaacctgctcaacgacgccttgcagcgcagcggcggcaacctgacccaggccagcctggaactggggatggccaagaccaccctgttcgacaaggtcaagaaatacgggttgagccactgatggatctattcttgaaagccgccatcggcgcggcggtggtgttgatcctggcggcgctggccaagaccaaaaactactacatcgccgggctggtgccgctgtttccgacctttgcgctgatcgcgcattacatcgtcggcaagggccgttcggtggacgatttgaagaccacaatcctgttcgggatgtggtcgatcattccgtattttgtgtatttggcgacgctgtacgtgatggttgaccggatgcggctggaggcgtcgctcgcggtggccgcggtggcatggttgatggcggcgacggtgctggtcagcgtgtgggtgcgcgtgcacagctgacacgcggtgataaaaatgtgggagctggcttgcctgcgatagctatctgtcagtcaactcatcagtgactgatacaccgctatcgcaggcaagccagctcccacattgagttcagtggtgagctaccgaatgatcttctccacctgaatccccaatttcttcaagcgataccagaaactcctttcggaaatcccgatcttcgacgcggcggcagcctgcacgccgttgctctcgttcagcgcggccagaatgtaggttttctcgacctcggccagcgccgcatcaaggtccgccggcacgcccgggttgtcgccgagcagtgcggtaaccccctcctcggcaggcctggaggcgaacaggtaagccggcaggtcgatgtcttcaatcaccggcttggccgcaacgatggtcgcgcgctctacacagttctgcagttcacggatattgcccggccagttgtaagccgccatggcctgcagcgcctcggggctgaagccggtgatgcgcttgccggcagtagcgctcagggtatgagcaaagtgccgcgccaggggcacgatatcttcggcgcgctcgcgcagggcgggcagcggaatcggaaacacgttgaggcggtaatacaggtcttcgcgaaactctttgttggccaccgcgtcgagcaggttcttgttggtggcagcgatgacccgcacgtccaccttgcgctcgcgcgggtcgcccacaggctcgatcacccgctcttgcaacgcacgcagaatcttggcttgcaacgccaacggcatatcgcccacttcgtccaggaacaaggtgccctggtctgcctgcataaagcgccctacccggtccgccacggcgccggtgaacgcgcctttgcggtggccgaacatctcgctttccagcaagccttcagggatggcggcgcagttgaccgccacgaacggtttgtcggcgcggctgccatgcttgtggatggcgcgggcaaccatttccttgcccgtgccgctttcgccggtcagcaggatggttgcattgctgtcgcgtaccgaatcgatcgcgtgcagcacttggcgaaacgccgggctgtcgcccaccaggctgtcgaactgcgcatgctggtcgagttcggcacgcaagcgtgcgttgtcgcgcaggatgtcgcgaaattgcagggccttggccacggtgatgtccagctcgtcgatatcgaacggcttggcgatgtagtcgtaggcaccattgcgcatcgactgcacagcgtttttcaccgtgctgtaggcagtcatcacgatcaccggcaaatccgggaagcgcaccttgatttcagccagcagcgccggcccgtccatgccgggcatgcgccagtcgctgatcaccaggtcgatgtcttcctgctccagcactttgagcgcatgcaggccgttgctcgcggtaaacacttgaaggccgttctggctcagggccgacgtcagcaagtcacagagcttgggttcatcgtcgaccaccaatacgttatgcgtcatgaccttcctcatcatcgccgtcgtcttcaccctgagccggaatgtacaggctaaaggtggcgccggcatctttctcactggcgcattcaatgctgccatcgtgactttccatgatcgaatagactttcgccagacccaaccccgtgcccgaggccttggtggtgacgaatggcgtgaagatgcgctcaatcatgtccgccgggatgccttggccggtgtcggcgatgctgatcaccgtgttgtgctccaccgtgcgaatgcccacggtcaggcgcccgccttcgggcatggcatcaatggcgttgagaatcaggttcaggcacgcctgcttgagctgcttggcatcggcatacaaggtcgctcccggcgcctggtcatcgatttgcgcatcgatattgtgggtggccagctccgggctgcaaaaacccaggatctcctccaccaacgggcgtgccggctgcaacacgcgcaacggcgcgttgggcttggcgaaatcaagaaactcggtgatcaggtcattgatgcggctgacttcgctgatcacatactccaggtggcgcttgtcggtttccggcaggtcgacgcgccggtgcagcaactgggtggcggtcttgatgatgcccaacggattgcggatttcgtgcgccaggcccatggcgacttcacccagggcgtgcagccggtcgcggcggcgcagctgggcttcgaggtggtgcagctcgcccaggcgctcggtcatgtggttgaaggtgctgctcagttgcgccagctcgtcgccaccggagaccagtacgcggtgctcataattgcccgagatcaccgcattcacgccctgggacaagtcccgcagcggcttggtcaggcgtcgcgacaccaatacgccagcccccagggacaaggccgaactgagcaggaaaatcagcacgaacaggttgctctggttcaccaagcccaccaggctggtgtggcgcagcaggccgctgaagatcacaccttgcaggtcacccgcgtcattgaagatcggccagtacaaaccgctgtagttattggtgaactgctcgctcggctgcttggtggcgcgcatggccttctcgacactggtcgggatgcgcgaagggtggttttcgaaacgctgggtcgaaaaaatctctgaaaaccccgtggggttcgccaggtagaggcgcaggtcgagggaatgcacatcggccacactggtcaggaagctgctgtccaggtaggtggcaaccagcagcaaataatcgacgccctcctgggtggtttcgaaggtcgagaccaccaggcctgtactcacgccagccacttgcactgtctgcaacacggcgttgctggtcaggtcgatctgcttgacgatgtcgtcggacgccgtgctgaacatcaccttgtggtcgctgctgcggatcagcgcgaccacgtcgatatccgtggcatccgcgatgtcggcagtcagccggtcatgcttggctgcctgcttgcttgaaggcgggctggtgtagcgcaggaacagcttggccatgcgcgcgttgtcatgaaggatgtcgccaatctcgtccttgacgatcttggtcgactcttgcagccaaatacgcacgttactgtcgaaaatctgcgacaacgtggtcgccgccagttcggccgcgatcatggtgggaatgacgctgaccagccaaaacgccagcaccagcttgcgctggacgctccagcgcgagatggcaaaggggcgggctttctggcgggtcttggtgatcatcaggtttcgcttatcgcagcagccatggcagggtcggatcgatccggtcggagaaatattttcgcaagcttgagcaccgcattgaccagccaattacggtgacggaaaaacatgctgttgccctggaattcacaccccaggcgcagcttactggcatacccctcctgaccgcactcatacaccgggatattgtgcgcaatacaatagtcgacattggtcagccagctccgaaagtagaggttgtactcacggctgaacgcccggtcatgcccgaagaacttgtcgatcaaccggtgctggtccaacaggatcaggttgaaggccaccagatgctcgtccacccagtaaagtacacagactgcacggtgttcaaggcgttcaaggatgccggtgaagtagctggccggcaggcgttcgaactgtaaatcggcgcggctgagggtgtcttcgtacagacgcatgacgtgcggcaacacatcatcgatattgtgccgccactccacccgcgggcccggcgcacgcagcttgcggcgcagatccttgcgggtcgatttgcacaacgaccccaggtaggcgtcgaccgaaccgtaaggcacgctcaacaacccgctgggcaaactcggcatactttgaaaacccgcagcacggcaactggcggcccagtgcgggtctttggtcggcacatctttcaccgccaccaggcccacgccaaattcgttggcatcctggcgcgcggcctgcaacaagtgcttgagcaacaaggggcgccgcgcctcgggcacgctactggcaacccccgcgtcgcaacgctcggcgaccggtgagccgatggcatacaactgcagctgtaaaacacccggccacagccgctccaggcgctcggtaaagcgcttgccgctgcctgacaccgtggtgtcgaggcgataatccgtgatgaacgcggcggcaaccgccaccaccgttccgtgttcgtaaacagccaggtagcgccatttgaaatcaacaatggccgcgctttccacggccacgtaatagtcccaatcctccagggcaccggggaaacagtcgttccaggtactgcgctggatggcccggatagtcgagaaggcttgggcggtgatcacgtctgttcctcaggctcaggcccgctgtcgataatcttcgggggcgtggtaaaccgcggtgtgctgctcgacaaacccggcgctcaactcgatcacacggcggtactgcaaatcgacggtgatcatgtggtagcagttgtccaacagaaccttggtcacagggccgccaaggtggcgctccacgtaatcagcgttccagcggctggtgatgtcatcctcgatggaatgcagcaccaacgccggcaccttgacctcgggcatgcgttttttgaccacggcgttcatccggtgcaactcacgcaccgtgatgccttccatggtcagcaaaccggcctcgctgctctccccttccttcatctggcgctcgacaatcgcccgcaggcgctcgttcttgatgccgtatggcggcttctcttcgaagcggcagatgtgcacgccgaacgggatcttcatcagcaacggcgtcaaaaacgccagcttgtgaatgctccagccgtcgtacttcaaggtggtcgaatacatcaacagcccggccacttgccccgggtgctcggcggccacgtacatcgacatcaccgcgcccatggacaagccaccgacaaacacttgctcgtggcgttgtttgacctgggcgaaggttttgcgcacgccttcgtaccagtccagccaaccggtggcctgcaggtcgctgttatcgccgcagtgcccggccagggtaggcacgtacaccgtgcaattacccgccttggccaagcctttcgccacctggcgcaattccgtcggggtgccggtcaggccgtggatcaacaggatcccgaccggaccttcaccgagaacgaagccggcatcaccttcaccgaggtcgatcccgaggttgttcaccgtttagtcgctcgcaccagcagttgctcgaggagtttcaggcccaggtcgatttccgggtagctgatttccagggacggtgccagggtgatcacgtttttgtagtagccgcccacgtcgaggatcaggccgagtttctgaccgtcaacgatcatgtcgcctttcatgccttcttcgaccatgtagtccagggtcgccttgtctggggtgaagccatccgggccgcagatttcgcagcgcagggccaggcccaggccgtcgacgtcgccgatgatcgggaaacgcttctgcaggtcttgcaggccttccaggaagtatttgcccttggccatgaccattgcgccgtaatcgacttcgttggtcatcttgaacatttccagaccgacagccgtgcccaacgggttggaggcgaaggtggagtgggtcgaacctggcgggaagaccttagggttgatcaactcttcacgggcccagataccgcccagcgggttgaggccgttggtcagcgccttgccgaaaacgatcacgtccggctgcacgtcgaagtgctcgatcgaccacagtttgccggtgcggtagaagcccatctggatctcgtcggagaccatcaggatgccgtgctgatccagcacttgcttcaactcgcggtagaagttcatcggcgggatcacgtagccgccggtgccctggatcggctcgacgtagaaggctgcgtattcacactggttggttttcgggtcccagacgccgttgtattcggtctcgaacagacgcgcgaactgctgcacgcactggctgccgtattcttccttggtcatgcctttcgggccacggaagtggtacgggaacggaatgaagttggcacgttcgccaaagtggccgtagcgacgacggtagcggaagctcgaggtaatcgacgacgcgccgagcgtacggccgtggtagccgccttcgaaggcgaacatcaggctcttgccgttggaggcgttacgtaccactttcagggagtcttcgatcgactgcgaaccgccgacgttgaagtgcacgcgaccgtcgaggccgaatttcttcttggcatcgaccgcgatcatttccgacagctcgatcttgcctttgtgcaggtactggctggcgatttgcggcagggtatcgatctgctgtttcagcgcgttgttcaggcgcgggttggcgtagccgaagttaacggccgagtaccacatttgcaggtcgaggtaggcctggtcttcggtgtcccacacgtaggagccttcgcaacggctgaaaatacgcggtggctcgatgtagtgaacggtgtcgccgtaggagcagtacttggcttctttatccagaagaatctggtcttcggcggtggcgattcggatatcagacatggtggaagagttcctgattttcaacagagaggtcagtagcagtgaaggtggtggcgttggcggcgatgcccattggcagcttggccagcagcgcaggcacttcggcgaaagtgtcgaaacgcgcgtgaggaatatggttggcgacgcagtagtcagcgaggctgcctttggcgaagacgaaatcggcggtggaggccacgcacatatcggacttgccgtcgccgatcaccagcacgcgcttgttgcgcggggtggatttgcacttgcagttgccggaagcggcacggcaggcatcgctggaatacgggaagtcgatgcgccagctgttctggtcgacctggcgcaggcggttggcgaggatcggcagcagcgtcacgtagttgcgcgacagaatgcgcgcgatgccttgctcgatgccgtcgctgaccacttcgatggtcgcgcccaggcccatgacgtggtcgacgaaatccgggaagtccgggtcaatctcgacgctgtcgaaatacgccagcagttcagcgggggtggccttgatcagtgccagttgacggctcaggcattcgcgtgaaccgatgtgcccatccagccattcctgctcgatggtttcccactccgggccggcgaagcgttggaggacgttgtcgatgacatcggtgggggtaatggtcccatcgaaatcacacacgatatgccagtgaatcatctgcgttgtaccttggaagggcgcgctctgtgcgcttgcagaaggggtagagcagggattgtgccaactgaacgaaacccggcagggctggggctttggccgttacgccgagagttttgtgtcgaaggagctacaatttttgtagcttgctacaaacaagatgagtgcttgcgccaaagccgcccttcgcgcgtgaatgcgcgcatgttcagataaggaatacgctccatgttcaaggtcactactgctgtattcgccggtttgctggggctgtggggcttttccggcgccgtaatggccgaaggcattaccggtgaagtcggtgcgggcgtcagctatcagccccacgacccgaccggcagccgttacgaaacccagccgattccctacttcgacctcgactggggcaatgtcagcctggggaccgacgacggcctgacctggagcgcactcaatacccacggcattactgccggcccgtacatcaactacctttcggggcgcacggccaacggctcgctgcgcggtttgcgtgatgtacaggacgcggcggaggtcggcggcttcattcaatatgccccggccgagttctggcgtgtgtacgctcaggtcggccacgcggtcggcggcgcgcgcgaccaaagcggagtgttgggcaaactgggcggggagctgggctatccgctgggtggcgggattatcggcagcacgggcttgatggcgcattttgccgacgcgcgtcagacccaggcgtttttcggggtggatgacaaggactccgcggcgtcaggctttcgcccctataacgccagcgggggctttcagaacctgacgctgacgcagagttttgaattcccgctggatacccattggtcgttgctgaccagcgccagctgggtgcacctggtcggctcggcagccaacagcagcatcgtcaaagagacgggcgacgtgaaccagggccaggtgcagacggcgatcagttacaagtttgactgatgggcaactgtgggagccagctcccacagagaagcaacgctgcggtcagcccttggcttcgctgatgatctgccgaatcgccccgacaaaggcttcagccggctgcccgccgctgacggcgtactggtcgttgaagacgatggtcggcaccgacgtcacgccccgcgaaacccacagttgctcctgctcacgcacttcggcggtgtattcatccgaggcgagaatctcggccgcacgcttgatgtccagcccgacactttcggcaatgatcgccagggtcgcgtggtcggacgggtcctgaccgtcgctgaagtacgccttgaacagcgcttccttgaggttgtactgcaacccttcaagcccggcccaatgcaacaggcgatgggcgtcgaaggtgttgtagatgcggctctgcccatcggtgcggaaggcaaaccccaacgcggcacccatgtcgcgaatgcgctcgcggttcgcctgggattgctcggcggtggagccgtatttctcggtgatgtgctcgacgatgttttgcccttcagccggcatgttcgggttcagctcgaacggctggaaatggatctcggcctgcacctcggcgcccagctggtcgagggcctcagtcaaaccacgcaggccgatgatgcaccaggggcaggacacgtcgctgacgaaatcgattttcaggggagtactcatggctgggagacctcgctggcttcagtgagccgcaaaagctccacgatacaccaacttcacagcaccttcgaaggctcgcccaagtcaatctgcgcccaatgcgcggcatcttcacgatgggctttgaggtacggcagcaccgccgtcaacagcggcgccttgaacgcctcctggaaacgatgggccatcccggggatcagtttcagctggctgccctggatatgcgcggccaggtgcacgccatgcatcaccggcaacaacgggtcagcggtaccgtgtaccaccagcgtgggcacgcgcagttggttgagcaatggcacccggctcggttcggcgaggatcgccatgatctggcgcttcacgccgtcggggttgaaggcgcggtcataggacagcgccgcctgatgcagcaacacctggcgatcatctttcacataagggctgcccaacgccgcgagcaaatcggcttgctgctccagcgccacttcgcggttcggcgcactgcgtcgcgacagcaactgcaccagcgccgcactcggtgccggcaggccttcggcgccggaactggtcatgaccagggtcaggctttcgacccgttgcggcgccatggccgccaggtgctgggcgatcatgccgcccatgctcgcgcccagcacgtggaattgctggatctgcaacgcgtccatcaagcccagggcatcatccgccatgtcggtcagggtgtacggcgccgccacgggcaagccgagcttgtagcgcagcacttcaaaggtcaggttggcgctggccggggcctggcgccaggtagacaagccgacgtcacggttgtcatagcgaatgacccggaaaccttgctggcacagggcgaccaccacctcatccggccagtggatcaactgcccgcccaggcccatcaccagcagcaacgcagggtcggacgcacggccgatgctctggtaggcgatgctcaccttttccaggtcgaccgtttgagtcgggacattgacatcacatcgagaagccgcaaaagacggcaggccgaacagtagagcggccagtaaaagcaacacgcgcatgaaaaacaccgaaacgcagaaccccagtagagcgcgagtctgatgaagtttgttcaagcgcgctgccacagttgcgtgacagtttgatgaagagtgcccagcggtcatgttttgtcgacaggcgcgccaacatgagacaaactcacgcaattcgaattcgccacaaattgttttcatggagagcccgtgctcgaaatccgtcatctcaagaccctgcacgccttgcgcgaggccgacagcctggtggaagccgccgagcggctgcacctgacgcagtcggcgctgtcccatcagttcaaggagctggaagaacgcctgggcatgccgctgttcgtgcgcaagaccaagccactgcgctttaccagcgccggcttgcgcctgctgcaactggccgacgcgaccctgccgctgctgcgcggcgccgagcgcgatatcgcgcggttggccggcggcaccgccgggcgcttgcacatggccatcgagtgccacagctgtttccagtggctgatgccgaccatcgaccagttccgcgacgcctggccggaagtcgaactggacctggcttcaggtttcgccttcgccccgctgccggcgctggcccgtggcgacctcgacctggtagtaacgtccgacccgctggagctgccgggcatcacctatgtgccgctgttcacctacgaagccatgctcgcggtggccaaccagcacgtgctggcgcacaaggcgtatatcgtgccggaagacctgttgaccgaaaccctgatcacctacccggtggaacgcgaccggctggacatcttcacgcgcttcctcgaacccgccgatgtggagcccgcgcaggtacgcacgtcggagctgtcggtgatgatgatgcagctggtggccagcggccgtggtgtgtgcggcatgccccattgggcgctgcatgaatacagttcgcgcggttacgtgaaggccaagcggctgggtgagaaaggcttgtttgcgacgctgtatgcggggatccgcgcggacatgctggacgcgccgtatatgcgcgatttcttgttgacggccaaggacacgtcgttttcgacactggatggcgtgagtgccgttcgctgatcgtcgaaacgatgaaggtcacgtgtgggagctggcttgcctgcgatagcggtgcatcagtcaggacatttccactgacagaccgccatcgcaggcaagccagctcccacaaggaatcttagttccccgagagctcaagccacatgtgaatcttgtcgaagtaatcctcacccacccgcaccgccagcggctccaggccgtactggataaacccgcaacgccggtacaacgcaaaagccgcgtcgttgccggcggtgacggtcagctggaggtgaacgcctggggataggcgccgtaagcctccagcatcagcgcccggtaggcctcggcatcgccagcacccaaggtgcgaatgatcatgctgtcagggatgcgcgataaaacggcaggatcaggtcgcgggtcaacggagccagctgcaggccaccgtcaccggccgggtcgatccagcgcacttcttcgatttcagcggcgggcgttaccggcacgtcgatgtgcacctgaaacagttcggcttccacggtaaaccccggttcgttggcggcgggagcggaaaagttgccgaggtaaatggcgtcgctgggttctatctgtaaattcaactcttcgtgcaattcacgggcgagtgcctctgccggttgttcgccggcgtcgattttgccgccgggctgcataaaggcctgggtgccgcgcttgcgcaccagcagggtctggccgtcgctgccgatcaacagggcggcggcgatgcggatggtggatggcatgggaggttttcctttgaagcaaagggcgcaaggatcacatgatcaaccagaccgccgcaatctactgtgggagctggcttgcctgcgatgcaagcaactcggagcatcaggcaaaccgtggggatgccatcgcaggcaagccagctcctacagttttgagtgcgttcatcctgtagtcacaacagtgtccttgataaacacgctgtaacgcgcgccttccatggtttcaaaggcgatcagcttgtccaccagcggcaggttcaagactttaccggcattgagcagcaacatgccgttatccgcgttcaagttgcgcgccagtaccatgccctcctccagttcgcgcgtgccgaggactttgacgttcgggtcgcccagcgtcacgtcattgaggtaggtggcgcacacccgcacaaagtcttcgaccatctcggggtcatagagccgcccggcgtatttgcggatgtacagcaacgcttcgtcgctgttcatctgccgctccaggatcaagcctttttgcagctcgataaaatccacggcgagtttcagcagccgggaacctgcgggaatcgcttcgcctttgaggtggtcggggaaaccgctgccgtcccaacgctcctgatgatggcggatcaggcgtgcggcgtctttcatcggttccagggtcatcagcagcgattcactttgcgtggcgtaggcgcgataacgctcgcggtcggcgctgtgcagcaaatccgagggcgaggccatcatgctgtcgctccagctcagtttgccgatgttgtaaagcgcggcggccatggtcaggtcgcggttgctcgcctcgtccacgccgtgggtgacgcaccaagtgcgcaccagttcgatgatctgccggttggtctgcttggcacgcggcaggcgcaggttggccagcagggagaacacttcggtgccggtcgcgtagctgtgcttgagttcttcgtaagccaggtcgagcatatcggcggtttgctgcagctcgctggtgcgcgcgaccacacgtttttccagggaagcattgagctgcttgagctcgtcgttctgctgctggatcaactgttccaggcgcccgcgctcacgctctgaatgttgatgagccagggattggcgcagggccaggagcaactcctcgtcattccagggtttgctcaggtagcggtagatctggccctcgttgatggctttgacgatcagcgtcaggtcggtctcgccggtcagcaggatgcgcacagtgtgggggtaggcttgatggatatgcgccagcaacgaagcaccatcgatgtccggcaggcgcgcggcactcatcaccaggtcaacaggctgactggcgagaatcgtcaaggcgtcggcagcgcaggttgcactgtgcagttcaaaaggttcaaggcgcagcaattgcgtcaaactgtgcaatacgtccgggtgggcgtcgatcaacagcaccacggcacggtcgctatcggtgaacgtaactgactctcccatgggacacctcggatcgtcggcatgtagtccttacggtctgggtttgccctcctggcgtttactgaggagtctagtcggtttttcggaatatgatggcgttacgatatcaacgcataaaaaaagccgctccagaaaccggagcggccttcgaggtgaaacgtggatgcctcacgcgtcggcttttttcgggctggagccgaacgaagcgaaacgcttgttgaacccggcaatccggccttcggcctgagtcttgcgctgttggccggtgtagatcgggtgcgaggcgctggaaacgtccagcggaatgtaagggtatgtgttgccgtcgctgtgcttgtgggtgcggtcgctgtcggcggtggagccgatcaggaaaaacacgtcggcggcggtgtcgtggaacagcacggtgcggtagtcgggatggataccagctttcataaggcctccggggcgtttgggtgcatttaacgtgttatacagtaacacaaatcatgcacccaaacgagaaccgattgcaataataatagaccagcaacgtctatgcagcttcttgaaagtccatttccggcggctgtttggagaagccacgcgtcaggaaacccaagtaaaccagcccgattgccaaccacaccacgcccaggtaaatcgccaggtgatcaaggctgatcatgagccacacatccgccagcaggccgatggtcgggaacaccagaaacaggatcagctcacgtacaccgcgttgcttggcgcccacccagtaatgaaagatcaccgacaggttcaccaggctgaacgccaggaacgcaccgaagttgataaacgaggtggacgtggtcacatccagcttcaacgcgagcaaggccaccaccgcacacagcagaatgctgttcaccggtgtgccaaaacgctcatgcaacgtcccgaagaacgacttgggcaacacaccgtcacgccccattgcaaacagcaggcgcgaaccgctggcctgggccgacagccccgaggcgaactggccgacgatcaggccgatcaggaagatcgacacgaacaggtcaccaccgatattgcgcgcgatttcatacgcggccgaatccacgtcggcaaactcgaaagacgggtgagcgacctgcacgaagtatgacaccccgacaaaaatcagcccgccaatcaaggtgatcaacatgatcgcccgtgggatggtgcggcgtgggtcacgggtttcctcggtgagggtgctgacggcgtcaaaacccaagaaggaatagcacgcgatggccgcgccgctcatgatcaacggcatctgcatctggccgttgaagaatggggtgatggtccacagtggcttgcttgcatcaccaccgatgtagtggatgcacaacaccacgaacgcaatcaggaccaacgcctgcaccagcatcagcaacgcgttgatgccattggccagtttcaggccgatgatattgatcacggtggtgatgccgataaacgccagcacccagacccactgtggcacggctggaaatgctgaatgcaggtacgccgcgccaatcagccagatggccatcggcaggaacaggtagtcgagcaacaccgcccaaccggcgataaagcccagtttcgggctgatggctttgcgcacatagctataggccgaaccggccaccggaaaggccgacgccatacgcccgtaactcatggcggtgaagaacatcgccaccagggcggccaggtaagcggcgggcaccatgccggcggtggattgcgccaggatgccgaaggtgccgagcacgatgattggcgtcatataggcgatgccaaacagcaccaccgaccctaacgacagggtgcgttgcaaacgagccatgagcgattctccgctgatttattagatttatggcagaactgaagtcggtggagcacgagcactatttttatgatggagacagcttttgtggcgagggagcttgctcccgctgggctgcgtagcggccccaaaatctcagggccgcttcgcgccccagcgggagcaagctccctcgccacaggggtctgtgttaagtccgagggatcagcagttcgcgagtcccatcgctgcgctcaatcacctcacccggcaatttcaagcgctggtcatccaggtagcggtaatccttgcgagccgccgccagttggtcgagatccagctcaaccgtgaattgtccttcctcgcgcccggcttcgaacagcaaggtaccgaacggatcaaccagggcgctgccgccggcaaacaccaggtcgccgtcgccttcttcgacgcggttgaccatcagcgcgaacgcctggttttcctgggcacgggccatgatcgcggtgcggtgggtggggccgtacgggtccatgttgccgttggtcaccaacaacagctgcgcccccaattgccccaatgcgcgggcggtttccgggaactcgatgtcgtagcagatcaacaagccaacacgcacgccgttccacaggcacgtggcgtagcgatcaccggggttgaccaccccgcgctccagaggccacagatgggtcttgcgataacgcaaggcgatgccttcgggcgtgatcagcaaggtggtgttatagaattggccgccatcgttctcgatcatgccgatgaccacggcgatatcgcgcgcacgcgccgcctggataaccgcctgcacggtggggccatccagcggctcggcgacatcggcgacggtttcggccgacgggaagcctgtcaggtgggtctccggaaacacgatcagttgcgtatcggcggcgcaggcagcaattgccgccaaggcgcgctcaaggttgtaagctgtgtcgttatcacggcctgccaactgggcaaattcgaccttcatgagtattccttgttctttatctgtgccgcagtatgcgcagccacaacctgccagggaattacgcggcgggggtaacccgataggggtagatagatgaccatgtcgctggatgacatcgcctggcaccgttcggtggggcaaatgatagacgcgctggaccaggccaatttctggacccagcttgtcagattgctggaccagtacgtgccgttcgacagttgggtagccttgctgttcagcagcgaacaccggcccttggtgttcgccgaatgcccgggcctggacggcgcgcccgaccaactgttccaggactacctcaacggtctctacctgctcgaccccttctatatcgccagccgcgaactgtcgcgcacgggcttgtttcgcctggccgaagtcgcgccggagcacttcgaactcaccgagtattaccagcgctactttcgcctgaacgtggtggccgacgaaatccagttcaattgccaactgccggatgggcgtaccctgtgcctgtcgctgggctcacggcaacgttttgacccggcgcagattgccctgctgtcgttgattcagccctgggtactgagcctgctgcgccagcgcctgccctttgagctcaaccaggtcagcgcgctgcaaccaccgctgcacaatgatgaatggggcgcgcaactcaccgcccgcgagctggatgtgggccgcttgatgctcagcggttgctccagcaaggaaatcgctcgtaagctggaaatctctgttgaaaccgtgaaagtccataagaaacacatgtacagcaagctagggatcaaatcccagtcggagctgttctcgatctttctacaggcgcaaaacgcctagccgatgagtccgaacccaaggaaaaccgtatgagcctgtcgttactaagccgttacgccttctttgccgtgtgcgtcattttcaccctcgccagcctcccgtttatcgaacatgaatggctgtggcccatcaccgtggtcaccggcattctcagcctgatcggcctgttcgacctgctgcagagcccccacgcagtgcggcgcaactacccgatcctgggcaatatccgttatctggtagaagccatccgcccggagatccgccagtacctgctcgaatccgacagcgacgccctgcccttctcccgggcccaacgctcgctggtgtattcgcgcgccaaaaatgaaagcgccgacaaaccgttcggcacgttgatcgacgtgtaccagtcaggcttcgagtttatcggccactccatgcgccccgcgcccttgagtgacccgagcgcgtttcgcgtgatggtcggcggcccgcagtgcaagcagccgtactcggcgtcggtgttcaatatctcggcgatgagctttggctccctcagcgccaacgccatccgcgcgctgaaccagggcgccaagctcggcaactttgcccacgacaccggcgaaggcagcatcagcccttaccaccgcgaaaatggcggcgacctcacgtgggaactgggcagtggttactttggctgccgcaccagtgacggccgtttcgaccccgaacgcttcgccgtgcaggcgcaaaacccgcaagtgcgcatgatcgaaatcaagatgagccagggcgccaagcccggccacggcggcatcctgcccaagcacaaggtcaccaaagagatcgccgaaacccgcggcatcctgatgggtgaagactgtgtgtcaccgtcgcgtcatagcgcgttttcaacgcccgtcgaaatgatgcagttcatcgcccaactgcgcgaactgtccggcggcaaaccggtgggtttcaagttctgtctgggccacccgtgggagttcatgggcattgccaaggcgatgctggaaaccggcatcctcccggactttatcgtggtcgacggcaaggaaggcggcaccggcgcggcacctgtcgagttcaccgaccatatcggcgtaccgctgcgtgaaggcttgctgtttgtgcacaacaccctggtgggcctgaacctgcgcgacaagatcaagctcggcgccagcggcaagatcgtcagcgccttcgacatcgccagcgtgctggccatcggcgccgactgggccaactcggcgcgcggcttcatgttcgccatcggttgcattcagtcacaaagttgccacaccaacaaatgcccgaccggcgtggccactcaagacccattgcgccagcgcgcactggtggtgccggacaaggcccagcgcgtgtttaacttccatcgcaacaccctcaaggcgctggcggaaatgctcgccgccgctggccttgatcacccttcgcaactttctgccaagcacctggtacggcgcatgtcggcgaccgagatcaaactgttctcgcaactgcatgtgttcctcaaacccggcgaattgctcaccggtgaggtgaatggcgagttctattcgcgcatgtggcagatggcgcgggccgacagcttcgaaccccatgaagaagtggccgcctgacccccttcccccagcctgcccaccccgggcaggctgttgagacattcagtaatacccagcctttgcaattgcttacaaataccgccaacctgcgcccgcccgacgtgcggcgtacgacaacacgcgcattcgcctgtcattactaaacccattgttcaagagcccgctgccatgctgaacggacgcgacccgcgcatcgatttttttcggggcctggcgttgatcttcattttctgggatcacgtcccccacaaccctctcggccagatcactctgcgtaacttcggtttcagcgacgcggcggaagtctttgtattcctcgcgggttacgccgccgtgctggcttacggcaagatcctgcaacgcgatggctactgggttgcctcgctgaaaatcctgcgccgcgcctgggtgctctacgtggtgcacatcttcctgctggcgatgctgatgggcatcgtcttcttcgccaacagccatgtggaaacccgtgacctcgtcgaagagatggggctgacgcatttcgtaactcatccgcaacaggcactcaccgacgaattgctgctgcgcttcaaacccaacctgatggaccccttgccgctgtacatcgtgttgctggcggggctgccgctgatattgccgctgatgttgcgcaagacttggctggtagtagcggccagcaccacaatttacctgttggcgccgtggatgggctggaacctgcgcgccattgccgatggcgtgtggtacttcaacccggtgacctggcaattactgttcgtgctcggcggcgcggcggcgctttacagtgggcgggaacgaccactggaaacacggccactgcggcgccagccggtgtttgcagcggccgcgatttatgccgtggcggccggtgtgctgaccctgtcgtggcgctggccagagatacatgacgcactgatgcccgcccccctcagcgacctgatctaccccatcagcaaaaccgacttgtcaccgctgcgcctgctgcacttcctcgccttggcctatgtcaccgccaagctgctgcccggccgtggctggaccgaaaactggctggcacaacatacctgccgcatgggccgttattcgctggaggtgttttgcctgggcgtggtactcgcgccgctggccgacatgatcaatgccctgaccggggatagcctggcgatgcagttgctgaccgccatgaccggcgcggcattgatggtgttgctagcgctgtggctggagttcaacaagcggctggaccagtcgctccagtccacctcgcagggaaggcccgctgtgcgcagcgagccttcgcgggcatcaggctgaacgtgctggcgccgtggtggcgttgttcggttgcaacttgaacacgtagaacaacaccgtcagcaccaccaggaacgccggccccacatacaacgccacccgggtatccgggaagtaggccatcaggccgaccaccaacaccagaaatgccagcgccaggtaggagctgaccgggtacagccacatgcggtacttgaggcccgcctgctcggccgggctcaggcctttgcggaatttgagctgggccagcaggatcatcagccaggtccagatcgcgccgaaggtggcgatggaagtcacccagacgaacacctgatccggcaccaggtagttgagcaacacgcccagcaacaaggcaaagatcgacagcagcaacgccttgcgcggtacgccgttactcgaggtggtaccgaaggtggccggcgcctggccgttctgtgccaggctgtagagcatgcgcccggtactgaagatgccgccgttgcaggaggacagcgcggcggtgatcactacgaagttgatgatgccggcggcagtcttgatgcccaggcgttcaaacgtcatcacgaacgggctgccctgagtgccgatttcattccacgggtaaatcgacagaatcacgaataacgcaccgacgtagaacagcaggatgcgccagaacaccgagccgatggcgctggggatggtcttctgcgggttgcgcgcttcaccggcggtgaggccgatcatttccacgcccaggtaggcgaacatcaccatttgcagggacatcaacacaccctgcacgccattgggcataaagccgccatgggcccacaggttggaaatacccaaggccacgccgtcgttgccaaagccgaacgcgatgatgccgacgccgccgatgaccatcgcaatgatggtgacgatcttgatcagcgcaaaccagaattcgaattcaccgaaggccttgaccgcgatgaggttgatggtgcccatgctgatcagcgccgccagggcccagatccagcgtggcgtgtcggggaaccacacgcccatgtacacggccacggcggtgatctctgccacacaggtcaccagccacaaaaaccagtagttccagccggtgagaaagcccgccaacgggcccagataatcctgcgcataacggctgaacgagccggcgacggggttatgcaccgccatctcgccgagggcgcgcatgatcaccaggatggccaggccgccgatgatgtaggagagcatgatcgccgggccggccatttcgatggctttggccgaaccgaggaacaggccgacaccgatacaggcgccaagggccatgaggcgaatgtggcgttcaccgagttctcgtttgagcgggccgccttgagcggtctcgccatggggcagtgggttgccgactggcataaaggtacaacctcattttgttattggattgcccacctgagtctgtggggagcaagccggtaagcctgcccccatgccgagaccggggccgcctcatgggcgggcccttcttgccgggcaagatcagcggggcatgcagtataaaaagctcgactcagaacctttcactataaaaacagggcaatttaggggaagcacccgttgaaacgtcattttacgggaacatcttacctgccccgggcggcaaaacgccgcagtccgcacgattggcatacttgacgggtcgatcacaatttccctcacaaccagcccccagcgactacgctttgagcaagtccgatcaatctgcgtgaagggatcaatcgactatgggcgcactgctgcaaaccgaatcgacagaggctgcgaaactacaaggcagttcggacccagcgcctttacccaaaaacaaaccccggccccgctattggcggcgagtgttctggctgatcgtactgatggccttgatcgccctcggtttcgccgccagcaaagagatgcgcacctcggacctgcaagcccgggaactcagccgcctggcccgtgacctcacctacgaaaacaagcccggcgccagtgacgccatggtctatcccggcgcaggccccttcgatcgccgcctgggctacagcgacctcggcaccttcctgccgcgcttgctcaagcgcggttacgtgatcgacactcaggtgcggttctcgccggcactgatggattacgccaacaaaggcctgttcgtgccctacgcggaaaaaatccaggcgggcctttcgatcaccgactgccgagctgtgccgctctatcgatacgactacccgcaacagctctactcgagcttcgctgcaatcccgccgctggtggtcaacagcctcttgttcatcgaaaaccgtgacctgctcgaccccgctcaacctcacgccaacccggccgtagactggccacgctttgccaaagcggcgtggtcgcaggttgccaagttgttgcatcttcccgggcaaagtgcaggcggcagcaccctggccacccagctggaaaaataccgtcactcgccggacggcctgaccgtctcaggcagtgaaaagctgcgccagatgttttccgccgccgtgcgcgcttaccacgatggccccgacacgctgcccgcgcgtaaaaacattctgcgtgactacctcaacagcgtgcccctgtcggcggtgccgggtcacggtgaagtgcacggcatggccgagggtttgcgggtgtggtacggcgccgatttcaaccaagtgaacactgcgctgaccggcccggtgaatgcacagcaaggcttggcgttgcgcgaagtgctgtcgctgatcatcgcccagcgtcgcccttcccattacctggccaagggccgcgatgaactggcgcaactcaccgacagccacctgcgcctgctggcgcagaatggggtgatcgaaccggcgctgttgcaggcggcactggccagcaaggtgacttaccgcgactgggtgcaacaacccacggtgcagccggtggaaaccaacaagggcatcagcgtggcccgtagccgcctggccgcgttgctcaaccgtccgctgtatgatctggatcgcctcgacctttcggcaaccagcactttgcaaggccaattgcagggccaggtcagcgactacctcaagcaccttgccgaccccgaatacgcacgccagatcggtctgctcggcgaacgcctgctcacccccgccagcaccgcgcaagtacgctacagcttcaccctgtttgagttgaccccggacggttcccgggtgcgcgtacaaaccgacaacaccgaccagcccttcgacatcaacgaaggcagcaagctggagctgggctccaccgccaaactgcgcgtgctcaccacctacctgcaaatcatcagtgaactgcacgataagtacgccacgcaaacgcctgctgcgttgaaaaaagtcacagtggacgatcaagaccgcctgagccgctgggcccttgattacctgattcagactccggacaaatccctggcgaaaatgctcgacgcagccctggatcgcacgtactccgccagccccggcgagcgtttttttaccggcggcgggctgcacaccttccacaacttccgcagccaggacaatggccgcagcccaacgctgcgcgatgccttgcgtgagtcgatcaacctgcctttcattcgcctgatgcgcgacgtggtgcgctacgtcacctattccggcgagaacaacagtgccgagttgctcaaggatgacaccgacccgcgccgccaggaatacctcgccggttttgccgaccgcgaaggcaccaccttcctgcgcaagttctggaagaaataccagaaaaaagacactcaggcgcgcctggaaaccttcctcgacagcgtgcgccccacgccgattcgcctggcggcggtgcatcgttatttgctgcccaacgccagccaggaaagcttcaacctgtttgtgcgcgcgcacatgaccggggtcaaaaccacggtaaaactcaccgacgagcgcctggaaaaactctacaaagactacggccccggcacctacgatttgcccgaccagggctatatcgccaaggtgcatccactggatttgtggttactgggctacctgctcaaccatcccgaagcgaccttcagcgacgcggtaaaagccagccggttcgaacgtcaggaagtctatagctggctgttcaaaagccgtcatcaaagcgcgcgggacagccgcatccgtaccatgctggagatcgaagcgttcctggatatccatcagcgctggcaggccgtgggctacccgttcgaccatctggtgccctcgctcgccacggccatcggcagctcgggggatcgcccggcggcactggcggaattgatgggcatcatcctcaatgacggcgtgcgccccaaagtgctgcgcatcgacacattgcactttgccgccggtacaccgtacgaaacccgcgtggtcaatgacccggcgccgggcaagcaggtggtccccgtcgaggtggccagggctttgcgtggcgcgctgtcccaggtggtcgacgccggtaccgccaaacgtgtggcaggcagtttcaaactggccgacggcacgccactcgccatgggcggcaagaccggcaccggcgacaaccgcattgaggccatcggcgcaggcgggcggattctcagctccaaatccatcaaccgtacggcaacctttgtgttctatctgggcgagcaccacttcggcacgctgacggcgtttgtgccaggccaatctgccgagcatttcaccttcacttcggcgttgccggtgcaggtgctcaagggcatggcgccgattttgatgccctatctgcaaccgggcagcctgacgcaatgccagccaacggccccctgatgacgtgacggtgagtgtggcgggtaccgagtgcaccgtccgtcggaagctcttgtgtggcatccaagatatatcttacgttatatctagacacacacagaggctcccaccatgcgagaccatcctcaccaacgcgacggttttgacccgcgcggcggccgcggtcgcggcccccgggtatttgcgcccggcgacctgaaactgctgctgccggccttgattgccgaacagccgtgccacggctatgacctgatccgccagatcgaaagcctgttcgacggcgcctacacccccagccccggcgtgatctacccgaccctgacctttctggaagaaagcgatttgatccagggcgacgccgatggcggaaaaaaacgctacacaatcaccgacgccggtcgtctcttcttaagcgagcaagcggttgcactggacggcgtgcgcatgcgcatcgacgtcagcaagcgctcgttgcgcggccaggaccgcccgccacaaatccacgaggcggtgcacaacctgcgccacgccctgcattcgcaccacgggcgctggagcccggaagaaatcgttcgtgtcgcggcgctgctcaatcgcaccgctcaatccatcgccgacgggaaagaccaatgactacgcaagccattcaccgcgtgacccacgaaatcaaacgtcgccgcctcgaagtactgcgggtggtcgacatcacgccacgcatgcgccgcattacgctgggcggccctgaactggcggggtttatcagcttgggcgccgatgaccatatcaaactgctgttcccgcagaacgccgccgaacaggccgccctggaaagcccgacgttcaacatcaagggcgacggcccgcaaccggccatgcgcgactacacgccacgccgctacgacctgaacatcggcgagctggacatcgacttcgtgctgcacggcgatggccccgcctccacctgggccgaccgggccaaagtcggccagcacctgtacatcggcgggccacggggctcattgatcgtgccggatatcttcgacagctacctgctgatcggcgacgaaaccgccctgcccgccattgcgcggcggctggaagaattgtcggctgggcgcaaggtgctggcggtgattgaaatcgccaatgcggctgagcaacagccactgaacagtgcggcggatgtggaagtgatttgggtggttcgcggtcaggatgacctgcttgaaaccgtgcgaaacctgacgctgccgcgtggctcgctgtacagcttcgtcgcgaccgaaaccaagctgtcacgccaggtgcggcgcgtgctgctggacacccacaaggtcaatgaagaattcctcaaggccgtgggttactggcgcgccgagggcagtgaagaagagtgacatctcaaacatactaaagctccaatgtgggagctggcttgcctgcgatagcggtgggacaaccagtcagtatttgtctgatgcaccgccatcgcgggcaagcccggctcccacattagttcgaaggtgttttcgagaatctgtccagccccagcaccgctaacgcaatcaccacaaaccccgccaaaatccccccggcattcacaaacacctgtggataaccgagggtatccacatcgatgaacgggtattgatactgcccgagcaaatgcccgcgcagcagtacgtagccgaagtacaccacagggtaaatcacccagccggcgaggtgcctgaggcgcaacgtacctttgggcacacagcgccaccaatacacgcagaacaacagcggcatcacgtcgtgcagcaattcatcggcgataaattgaaagccttgcgggctccacaaatgccgcagcagcaggttgtaagcgaggctcactaccacgatgctcgcggcgatcccactgctgatcgcgggcgccaggaaaaaccgcttcgccgccgaatcgcgctccaccagcgcataactgagcaccaccaccacaagggtgttggtcagcacggtgaagaaactgaaaaagctgatcagcccgcccagcaggctggcgccgctggaaaagcgcgagtagaaaatcaggtactgctgaatcgccaaccccacccacccggccagtgccgccgccgcgacaaagcgcttcacgggttcaatccagcgggcgtttggtgcgcatcagcttgacgtacaagccttcgactttttcccgcgcccacggggttttgcgcaggaacgtgaggctcgacttgatgcttgggtcgctcttgaagcagcgcacatcaatgcgttcggccaggcctgcccattcgtaatgctcaaccagcgtggtgaggacgtgttgcagggtcacgccgtggagcgggtcgttgcttgtcgcggtcatgccaggcctttttgcaaaaagagaaaacacagccgcgcaccttagccgacggggcctgacggtggaagcactgcattgaatatagaccctgagagaaagttccccttttcagcaaaaaaagagatgttatattgtaacgatacttatcaaaagtaactgattcgataccgtttgcagccttctctttttgccgttttgccaaggaatgtccgatgtccctctcttctctctggcgcttgaccccgcttgccgccgccctgttgatctgctccgaagcccacgcccttgagctgcaaccccaagtcatcaccggcaacccgctgggcagcgaacaactggcgtcgccgaccaccgtgctcgaaggcgatgatctgaccctgcaacaaaaaggcagcctgggcgaaaccctgaacaagcagccgggcgtgtcttcttcttactttggccctggtgccagccggccgatcatccgtggccaggacggcgaccgcatccgcatcctgcgcaatggcgtgggcgcgctggacgcctcgtcgctgtcctacgaccacgccgtgccgctggacccgatcaacgtcgaccgcattgaaattgtgcgcggcccggcggcgctgctgtacggcggcagtgctatcggcggcgtggtcaacaccttcgacaaccgcatccccaccgaagccatcgaaggcattcatggcgcgggtgagttgcgctacggcggcgccgacaccacgcgcagcagcgcgggcaaactggaagccggcaatggcacgttcgccttgcacctggacgccaacgcacgggaattcaatgacctgaaaatcccgggccaggcgcgcagccgccacgcgccggaaacggatgacgcccccggcaaaaacggtcgcctgggcaacagcgacgtgcgccaggacggcggtgccgtcggcggttcctacacctgggacgacgggtatgccggcctgtcctacagcaactacgacagcaattacggctcccccgccgagcaagacgtgcgcatccgcatgaagcaggatcactacgccttcgcgtccgagttgcgtaacctgcaaggcccgtttacctcggtcaaactcgacgcgggctacaccgattacgagcaccgtgaaatcgaaggcggcgaaaccggtacgatcttcaagaacaagggttatgaagcccgcgtggaagcacgccaccagccgctcggcccgttcaacggcgtagtcggcgcacaagtcactcgcaatgagttctcggcgctgggcgaagaagccttcgtaccacagaccgataccaacgccggcgcgctgtttatcctcgaagaaatgcaggccaccgaacgcctgaagctcagcctcggcgggcgcgtggagcacaccaacgtcgacccgaatgccaagggtaacgagcgcttcgccggggccgacaagagcaatgacttcacggccggcagcctgtcgtcgggcgcggtctacagcctcacgccggtctggtcgctggcggcaacgctgggctacaccgagcgcgcaccgaccttctacgagctgtacgccaacggtgcccacgtggccaccggcacctacgagctgggcgacgccaacctgaagaaagaaaaagccgtgtccagcgacctggccctgcgctttgacaatggcacccacaaaggcagcttcggcgtgttctacagccgcttctccaactacatcggcttgctcggcacgggccgcacgttgaacgatgaaggtgtggaagacgcgggtggtatccccgagtacaaatactccggcgtgcgcgcacgtttcgcaggctttgaagcccaggatcactggaaactcggcgaaagcgcctacggcaagtttgccctggaactgtcgggcgattacacccgcgccaccaacctggacacgggcgaagccttgccgcgtattgcgcctctacgcctgaacagcggtttgctgtgggaactggaccgctggcaggcgcgtatcgacgtggaacatgccgcaggccagggccgcgtgccggacaacgaaagcggcaccgatggctacaccaccctgggcgcgagcatgggttaccacttcaacatggggggcagccagtggctggcgttcgtgaacggtgaaaacctgacgaaccagaccgtgcgttatgccagctcgatcctgcgcgatatcgcgccggcgccagggcgcagtgtgcagtttggcgtgcgcaccaccttctaaaaaacaccacggttcccctgtgggaaccgggtttatgtgggagctggcttgcctgcgatgcggccacctcggtgtttcagtgacactcaggtgatgccatcgcaggcaagccagctcccacagaagcccgcgtttgcagcgacgttctgtcactgttaccaaatctgaaatgatgcatcttgcgattggcgctttctctcggcgcgcagtcgctttatccttgtcggcaacaaactgaaacgtttcactccccggtcgaccccatcttgccgattattcctgcctgcaaagacagcgctgtcttacaccgacctgcgcgtgggaaaccttcgcccgcctgtggataaccgcgctatccccagaaaaaccgaattaacgctgaaccaagcccgcgccgaatcgtcatctacagtgaagcacggggttacataattccaacgtcacggagaaacacactatgagcactgatggtgcttcgagccagagccgcctgctgcccaggctgctgggcgtcttgctgctgatcatggggctggccttgctggccggcggcgtcaagttgagcatgctcggcgggtcgctgtattacctgctcgccggtatcggcatcgccctcaccggccttttgctgctggccacccgccgcgccgcactaggtctgtacgcgctggtgctgttcgccagtaccgtgtgggcactgtgggaagtcggcctggactggtggcaactggtgccacgcctggccctgttgtttgccttgggcatcgtcatgttgctgccgtggttccgccgcccgctgttgcgtggccaggctgcaccgctgggcactgctgcactgagtgtggccgtggtattggcgggcgctaccgccgtggccagccaattcaccaacccgggtgaaatggtcaagaccggccaactggaccgcgacgcggtgcctggcatggccagcgcagcgccgacccaagccgatggcgactggaactcctacggccgttcggcgttcggtgatcgctactcgccgctggcgcagatcaccccggaaaacgcccacaagctggtcccggcgtggacctaccgcaccggcgatattcctggccctggcgaccccggtgaaaccaccgcggaaaacaccccgctgaaagtcaacggcatgctctacgtatgcaccccgcacagccaggtgatcgctctggacccggacaccggcaaggaaatctggcgtttcgacccaaagatcagcagcgaaggcgctgcgaacttcaagggttgggcccacatgacctgccgtggcgtgtcgtatcacgatgacgcggtgtacgcctccgaacagagccctaccggttcggccagcgcagcccccgtcagcgccgtctgcccgaaacgcatcttcgtaccgactgccgatacccgtctgatcgccctgaacgccgacaccggcaaaatgtgcgaagacttcggtgacaaaggccaggtcgacctgcgtgccaacatcggcagcttcgccccgggcggttactactccacctcgcctccggccgtgaccaaaaacctggtcgtgatcggtggccacgtgaccgacaacgtttccaccgacgagccaagcggtgtgatccgcgcgttcgacgtgcacaccggcaagctggtgtggaactgggacagcggcaacccggacgacaccaccccgttggccgaaggcaagacctacacccgcaactcgccgaacatgtggtccatgttcagcgtcgatgaaaaactcggcatgctctacctgccgatgggcaaccagatgcccgaccagtacggcggcgaccgcacgccggattccgaaaaatacagcgccggcctgaccgcgctggacatcgacactggccacgtgaaatggaccttccagttcactcaccatgacctgtgggacatggacgtaggcggccagccgtcgctgatcgacatcaagacggctgacggcgtgaagcaagcggtgatggcgtcgaccaagcaaggcagcatctacgtactggaccgcagcaacggccagccggtggtaccgatcaacgaaatccctgtaccgcaaggcgcagtggctggtgatcacaccgccccgacccaaccgaagtccgacctgaacttcatgccgccgccgttgaaagaacgcgacatgtggggcgtgaccccgttcgaccaactgatctgccggatcgacttcaagtcgatgcgctacgacggcccgttcaccccgccgtcgctgcagggctcgatcgtttacccgggtaacttcggcgtgttcgactggggcggcatttccgtcgacccggttcgccagattgccttcgtgaacccgagctacatggcgttcaaatcaaagctgatcccggcggccgacattgccaagcaaggcccgcgcgtcagtgaaaccgaaggcgtacagccgaacaaaggcgcgccgtacggcgtgatccttgaagcgctgctgtcgccgatgggcctgccgtgccaggcaccagcgtggggttatgtggcggcggtcgacctgaccacgcacaaaaccatctggatgcacaaaaacggcaccgtgcgcgacagctcaccggttccgatcccgctgaccatgggcgtgcctagcctgggcggtacgttcaccaccgccggtggcgtggcgttcctcagcggcaccctggaccagtacctgcgtgcctatgacgtgaaaaacggcaagcaattgtgggaaggccgcctgcctgcaggcgcgcaaaccacgccgatgacctacaccggcaaggacggcaagcaatacgtgctggtcatggccggcggtcatggctcgctgggcaccaagcagggtgactacgtgatggcgttcaaactgccggattaagcagtaccggcggtaaagacaaaggcggctaccttcacgggtagccgccttttttgtgcccgtgggagctggctcgcctgcgatgggggcacctcggcttacatgaaataccgagtcgtctgcatcgcgggcaagcccggctcccccacaagccagctcccacaggattacaagagtactcgctcgcgccgcatccacatttcaaacgccatggcattcagcggccggctgatcaggtaaccctgcgcggtgtcgcacttccattgcttgagcagtttcaggctcggctcgaactccacgccctcggccaccaccttgaggcccaggttatggctcatctcgatggtcgagcgcacgatgacgccgtcaccgctggtgctgtcgaggttgcggataaaggactggtcaatctttacctcctgcaccggcaggcgttgcagttgcgccagggatgaataaccggtgccgaaatcgtccaccgacaagctgataccgcaggcgcgcagttgctccagcacgctgagcgcttgttgcgggttgtgcatgatcgcgctttcggtgatctcgaaaatcagttgttcggccagaacgttgtattgcatcagcaacgcagtgacgcgaatggccaggtcatcatcggccaggtcgtccaccgaaatgttcaccgacagctgaatgtgcaaaccacgctgcgcccactcagccacctggcggatggcttcttcaatcacccacagggtcaagccgccgatgctgccggtgcgctcggccagcggaatgaattcgttgggcgacacctggccaagggtcggatgctgccagcgcagcaaggcttccgcctgacgcacgcggccatcattgaggtcgagtttgggctggtagcacaggaacaactcaccttcgaccaccgcacgccgcaagtcgcggatcagcgtgatctgccgctggtgcgccaggtcgcggtcctgctggtagatctgcaaatgcccgggcaagttcgccgcatcgtgccgggcaatcgccgcgcggctgatcaactcctctacctgctggccatcagccgggtaggcagcgatgccgatactgacttcatggcgcacttcgtcgttgccgatacgctgggtttcggtcagcagcccgtagaggcggtcggcacgggccacggcacggtcgatttcggtgttttccagcagcagcagaaactcactgccggcgatgcgtgcggcggtgtcgctggccaacaggctcatggacaggcagcggctggcctcgcgcagcatctcttccacgccttgtgggccgaagccctcgttgatcacccggtagttttcaatgcccacgtacagcaacaccaccggccgttgcgcactgatcgcgctgccgaggcgctccagggccaacgcgcggttgggcaggccggtgagcgggtcatgcaaggcgttatgcgccagttgccgttcgcgcacggcaatgccgctttgcatcgcattaaacgcccgcgccagcaggccgaactcatcatggctgcgcacgcgcaccggcgtgcggtagtcgccggcgccaattcgctcggctgcctcgacgagcgcgttgagcgggcgcgacacacgccgcgccaggaacaacgcgcccgccagcgacaccagcaacaccgccacggcaatccagagaaattgccggtccaggggcgcaaaggattccagggcatgatccagcgggctttgcagcaacacgcgcacttcatcgccatcaccggtgttcgccaaaggcagcacttggctgagcacgcgctggccgtaaaaccgtgtgatctgtgcttcggggttcaactgctcgtcgcgcaagatattgataatgccggccctgtagtcgtccggctgagtggtgaagagttggccggccttgccgtcttgtacgctgagaaatgacacgtccaggttgctcatggaacgcaattcgttggcgaacagcgcgtccatggggaaccccatcaccacgcgggcaatgggttgtgtgtcgaacacttcatcctgcaccagcaaatagggctggccagccaaggcgacgatcaacatctgcaagccgctgcgccgcgcctggcgcaaggcctcttcatagggaaacacctggccctgcgcgagcacaggcaaggtactgaccatcaccttgccgtgcaggtccagcacaaacacctcgctggcacgcaggccggtgccatgccggcgcagcgccgccagaatcgctgccgcctcgccttcgatcacggcatgcttgaacgggccatccacggtcaaccaatccaggccgtattgcaggcggcggccgcgcaggtcgagcaggcgctcgaatacctggctgcccgtattgagttgcacctgggcctggttctccacggcgcgggtggtggccgccttgacggcgaaataggtggcagccacgaccaccagcagcagcaacgccagcaccccggcaatgcgggtttggaaagtgtggcgccatttcattgccgagccctctggcagcgcttgcctctctctgccattgcgtccctttgtcatacgcctccctggcgactgctgacttggcgtcaaaaaaatagctattttaattcaatagatggtttcaggagattagctgggagattggatatgtacacccaataacaacggggattttattgtcagtttattggcgcacattgaaagactttcgcgtgtatccgttattcacgcaatgaacaggtgcgcaatcaggagcgcgcccgcatgaaatcgccccaccggcgcaccaagtaattgtgctcatccatcaccgaattccacaccgcaatgtgccccatacgctgctcataggccccgccgtcgcgcacttcccctacctcaatcagcggcaacccgtcactgcccaatagttcctcccgggcaggtttgccggcgtaccagtaatcccactcggcaccgctcaaatggtcccgggtgcgcgccgggttcccgatgtaatagccctggcgcgccatcactgcgcctggccagccggataaccaccaattcagataggcataagcggcatccagcaccggcccctgggcatggcgcgacagcgacaagccgccaaaccatgcgcgatagccctcgcgcggcacggccagccggtacttcacgcccgcgcggtgcaaacgcatcaaggtcggcgaccacaggctctggatatcgatgctggggctgaccatcaattgcgccgcctcttcatcatccgaccagaacgccgcaaagtgcccctccttctgcttgcgcaccaggatgtcggccagcacatcgatctcttcgatgctcatattgccgacgtccctgaagctcgccaggcccgcgccctgcaccgcgagcgcggcgtccagggcgccgatggcggcgtcactctgcagcgcgctgcgcccgcgcaattgcgggtcgagcagccagccccagctttcattgccctggctgaaaccttcgggcaggcgctcgggacggtaggcaaaactgtcggcattgtgggtcagcggcaacatgctgatgcgctcggtgaccgtgctgccgaggctgccatcgtgctgcacaaacaaccgctcgctcggtacgctgccgctgcccaggcggtcatccggtgacagacgcccgcgcttgggcaggtcattgatctcgtgccacagcgcgatgcgccgtgtgtcgatgggctggatcgctcgcgccggccacacgaagtcaacgttgtgaaaccactggtcgtagaggtcgtagctgtcgggctgcatcacggcgatgcgctgggcctgttcaacgtcgtgcacctgatacaccaggcgaatgccaagctcctgctcggcgcgcacgcgcaacgtttccagcaaggtgacggacgtaccgaggacgcgaagggtgatcatgctgcaaaccgccgtgagaacacttcaaaggagcgtcgcaacaacgcagggtcaaggccacgcaggataaacaccaggcgcgattggcggtcgctgcccggccacgcgggcaagtgaaccggggcatgcaggcaatgctgcacgccatgaatgacgatgggggccgagcttgcgttcacgttgagcagtccttttacgcgaaggattcgttcgccgtggcatcttagcagcatcgacaaccacaccccgaaacccacccaatccagcggctgctcaaaggtcaggcagcacacttgcgccgcgccgtgggtggccgtgggcgtttgatgcagttgccagcggctgacttcaacggcgggctcggcactgcgtaaaccttcgccgagcagcagttggtcgccactgtggacgtcgtgagtgtcgaggatcggcgcgccggcgttgagcgcctgtaaatgcgcacgcagtgcagggcagtcgcccgccagatcggtcttgctcagcagcaagcgatccgctgcggcgacctgcgccagccattcggggtgcagacgctcttgcagcgcggcgtggctggcatccaccagcgtgatcaccaaaccgatatgaaaacgcccgcgcagttgcacgtcgttgttcagggttgcgaggatcggcgccgggtcagccaggccggtggtctccaggatcacccgcttgaaagccggaatttcgccgcgcgcacggcgttgcagcaggccgagcaaggcgtctttcaattcgccacgcaccgagcagcacacacagccgccgggcagcagcacggtgtccggcgcaacctcttccaccagcagatggtcgatgccgatgtcgccgaattcgttgatcagcagcgcggtctcgccgaggctttcgccttgcagcaggcgcttgagcaaggtggtcttgccgctgccgaggaagccggtaatcacattcagggcaatgctcatgatgactccagataatccagcaggcgcgggtcgagagggtcaagcgggcggccgagcatgcgctcggcggcctgccagagtgggtcaagaccgctggccagttcttgcttgccggtggcgcccatcagcagataagacgcgccctggaagtccacgaccttgaggcggaacaccgccagcacctggttgatcgccgcaatccggcgcaaccgttcgcggcgcctgggtagttcatcgcccaaggggtcgctccagtgcaggtcttcgccgagcagcccacagagtccgcacatgcctacacctcactcatggcatgacatcgccggagttcgggcccagggtctggccaacgaacaggttgccgcccggctcgctggccaatagcacggcggtgggcgccacttcatcggccaggccaaagcgccccaggggcagctctctggccttggcgcgtttccagtcgtggctgatgccttccaccaacggcgtttcaatcgggcctggcgcgatggcgttgaccagtacgttgtctttcgccacctccagtgccagcgacttggtaaagccaattaccccggctttggccgcagcgtaatgggtgagttcggcaccgcccttgatgcccaactgcgaggcgacattgatgatgcgcccccagcgctgcgccagcatgtgcggcaaagcccgctggctggcgatgaacacactggtgaggtcgacgcgcagcatgtcgttccacatgtcgagggtgagatcaacgcagcgtgcctgggtcagcatgccagcgttattgaccaggatatcgatgccgccgaagtgctcgacgcagcgatcgacgctggcctgggcgccctcgacggtgcccacatcggccaggcattcgaacacctcggcgccgaggttgcgacagctgattgcgatttcggcaaggctcgcggcattgcgatcggccagcagcaagcgtgcgccttcagcggcgtaggcgcgggcgatggcagcaccgatgccactgccggcgccggtgatgacggcacggcggttaatcagttgaggcatgtaagttctccagaggcacacaccgtttccctgtgggagctggcttgcctgcgatagcggtggttcagtgaatacagctgtggctgacctgccgccatcgcaggcaagccagctcccacatttgatttgtgttgtcagtcgggccaacgcacggtcaaaccgccgtcgatgacgatgctttgcccggtcagatagctggacgcttcgcctgtcaaaaactgcaccagcgaggccacttcatccgcccggcccacccggcccaacgggatcgcccgcgccgctttcgccaacccctcaggccccagcgaattttttgcatccagcgactgcggcgtctcgatcagccccggaatcaccgcattgcaacgaatgcccagcggcgccaactccaccgccagcgaccggcacaaccccggcacaccggccttggccgccgcgtaatggctgtgctcctgccagccatacacgccaccggcaatcgaagaaatcgccaccagtgccccgccctctttcatgtgccgggtcgccgcgcggaaagtgcgcatcacccccgtcaggtcaacattgagcatctcgttccagcgttcatccgtcatctccagcaacggtgcgcggcgcagcaggccggcattggcgaccgcgtaatccaggcgaccgaaatgctgcacggcggcttcggccaacgcgtccaccgaggcggtatcgcccacgtccagcgccagcatcaggcactcgccgcccgcctcttccacccgggcaaccgtggtgtgcgggtcatgggggtcggccgggtaatacccgcccaccaccgccacgccggtgcgggcataggccacggccagggcttggccgatgccactggcggcgccggtaatcaaggcaactttaaggttcatctgcaactccttactggacggtttccgggcgcacatggcgcgcggcaaacatcagggcgccggacaaaaagcacggcagcgcaccaaaccacagcgcggcggtttgccagtcgctgccggcggacaacacctgggtcgcgccaaaccctgcgaccaccgcgccgatcggccccatggcatggataatcgcgccgcccgtggcgcggatgctggtggggaagctctcgctgataaaaaacagcgccgccgaatagggcccgatcaggaagaacaggcccaggctgtacagcccgaccaccgtcggcaggttgctcgggccaaacagcatgccggcgaacgacaacccgccgagcatccagcccaggccgatcacgttgcgacggccgatcttgtcgcccatccaaccgtgggtcaggtaaccgcagtaacccaccaggttcgacagcacgaggatgatcaacgagttctcgaacgagaggtgatgcacgctgacgatcaccgacgtaccgagcacgctgaacacctggatcgccgcccagttgagcagcagcgcggcgccgatcaccagcgtggcgcggcgggccgggccccggaacgcagccttgaggccggccttgctgtgttcgtcgtagtccacgccgtaggtcagcgcgacgttctgcgcttcggtcaccgcaccgcttttacgcagttggctgatgcgctggtggatctggaactgcgggctctccttgagcttgcgcgccatgaccgcgatcacgatcgccgggatcgcggcgaaaataaagcagccctgccagccgatgaccggcagcaacagcgcggtcaaaccggcagcgatcagtgcccccaccggccagccgccctgcaccaggctgtagataaacccgcgacgcttagtcaactttggatcttgtgaggcgccatacagctcgctcaaatacgtggcgttgacggtttcctcggcataccccaggccacccagcgaacgaatcaggatcagcggcgacttgccccacgccccgccaatcgcggtcagcgccgagcacagcgcggagccggccacggtgaaaataatgcctgtgcgccgtcccagtttgtcgacgacggggccaatggcaaaagcgaccaccgccgtgcccaccgccacccaagtcgcgatttcagcttgctccacttcaccccagccaaagtgccggccgatctccggcagcaaggtgccgaagaggatgaagtcatacaccgcaaacacccaggcgaaaaacgcaatccaggtggcgaagcgcacttccttggacgtcagttgccggggtttccagccagtcaggtcaagcttgttgtagatggacataaatcacgcctcgggagggtggacgaagggtcaggaacggggttggcggcggataaagtcgtcggcgatttcgtcgaaggtgacgaagcgcacgccggcatggctctggatgtgctcgatcaaccgctccagcatcagcagcacctgtgggcgcccggacacgtcggggtggatggtcatggtgaacaccgcgtgttcgtgttcgcggtagacccaatcgaactggtcgcgccacatttcttcgaggtggcgcgggttgacgaagccgtggctgttgggggcctttttgatgaacatcatcggcggcaggtcatcgaggtaccagttggccgggatctccaccagatcagtttcttcgccacgcaccaggggtttcatccaggtatcggggtgctggctgtagtcgatcttggtccagctgtcgcccttgcgtacgtagtaagggtggaagtcgttgtgcatcaggctgtggtcgtacttgatgcctttcttcaacagcaactcgttggtgaccttgctgaattcccaccacggcgccacgtagccggtcgggcgtttgccggtgacctgggtaatcagctcgatggatttatcgaggacgatttcttcctgctcggccgtcatggcgatagggttttcgtggctgtagccgtgcacgccgatttcatggccggcatcggccaccgccttcatttgctcggggaaggtttccatcgagtggcctgggataaaccaggtggtgcgcaggccgtagcgttcgaacaatttcagcaggcgtggcgcgccgacttccccggcgaacaggccgcgagagatgtcatcgggcgagtcttcgccgccgtaggaaccgagccagccggcaacggcatcaacgtcgacgccaaatgcacagaggatgtcttttgccatggtgtgtctccttaaaaagtcagtacggattcgacggccaacgcagcgcgcaacaggcgtgtgtcttctcccgagggggcgctgagcagcaacccggtgggcaggccctgggcatcgcggccgctgggcaaggtcacgccgggcatgtccagcaaactgccgggcatggtcaggcgcagggtggcgaggttggtgcgggcaaacaggtcgtcgtcagcttccagtggagccaaagcgggcgcgacatgggcgacggttggggtaatgagaatggcgccgtcgaggtcgtcgatcagttgctgttgcaggcggcggcgcgcgtcggtcaggtggatcaactggctggcgggcaatgcgcgggcggcttcgaggcggcggcgtacgcgggggtcgagcagctcggcatcgctgctgtcgagcagggtttcgtgcagggcgaaggcttcgaaggaacccagccagccgtggtgcttgatcagactgagggtcgcctggaacgttgggctattgcgcacttcaacccacgcgccggccgccttcagttggtccatcgcgcgcagcaggttgttgcgcacggcagcctcgatatcctccagcgcgccttgctcaagcacaaagtgctgacccttgaggctgcgtgcaacctgcgtgtgggtgcggccatggagcaagccgtcgatggccagtgcatcgcgcacgctgcgcgtcagcgggccgaggctgtcaagcgtgtgcgccagcgggaacacaccgtcgcggctgtagcggcggctactgctgcggtaaccgaccaggccgttgagggcagcgggaatgcgaatcgagcctgccgtgtcggtccccatggcgacaggcacgatggccgcagccactgccacggcagaacctgaagatgaaccacccgcaatacgcggttggtcactgccgtgggggttgtggggcgtaccgaaatgcgggttcaaacccaggccggaataggccagctcgctcagattggtcttgccgacactgaccatcccggcgcggcacagcaagcccacgctcggcgcatcaagcacggcggcaggcgcagtgcgccgataagcggcgccggccgtggtaacgctgccggccacgtcgaacaggtctttccaggccaggggtacaccatcgaacacactcaacggctgacctgcacgccagcgcgcggctgacgcttgcgcttcacggcgggcacgcccggcggtcaggcagatgaacacacctgccgattggctggctttctggagtgcctcttcgagggcttgcaccgggtcactgtgaccgctggcgaacgcctcggccattgaagtggcatctgacatcaactgaaccctcaaaaacgtacatatttattaaatgtacattttacaaaggcagctttcatgccagtcttgttttatggttttcagcgttactgcacttgatcgtcataaacgacgggctagatggttttgttgcagggaaaaaaaatcagcgcgactcaacctctgtgcgcccaatgaaataatgtatcttttatgaataagtacattttggtgcaaaaagtaacattccgccttccaaggccccataaaagtgcccgtgacgtggcgcagggtgacaggcgcaacttatgagagaatccccggccactttcctgcatgccccagagaaaccgatgaaagcagtgtccgcctcggcctcccgttacgcgatgattcaccaggtactgcgtgatgcgatcgtcaatggcaccgcacgccacggcctggttttgctggaagcgccactggctgatttgttcggcaccagccgcgtgccggtgcgccgcgcgctggacctgctgcatgaagaaggcctgatctgccgctttaacggccggggttacttgatcaacccgcaagggctggcgatggagcccctgcgcctgccgttgagccatgcgcacctgggcctgaacggtgaggatgagttggtggacacccggccattgggcgaacggatcgtcgaggagattggcgctgcgttgtcgacctgcattgccttcggccattaccgtctggatgagcaggccgccgccgaccactacggcgtcagccgcgcagtggtgcgcgaagcgctgatgcgcctgcgcgaccgtggcctggtggaaaaggagccctactcccagtggctggccgggccgttgaccgcgcgcgaagtcaccgaagactacgaattgcgcgcctgcctggaacccgaagcgttgcgccagagtgcgccgaaccttgaccgtgaactgctcgaaagcatgctcaagcgcgtgatcgacgcccaggccagcgcgcaatgcagcctggaggccatcgagcaaatcgaagaagacttgcaccagcgctgcctggccggcctgcaaaaccgcaagatcgcagcgctgatccgccagggccagagtccgatgatcatcagccggattttttaccgtttactgggaatcggcgccgatccagccatgttggccgaacatcggctgattctggagttactgctgcacggtgcatttgacgcggcggcgctgaacctgcgtgagcacttacagcgggcacggcagcggatgttgcagcggttgaaggtgttgtcggtactgcccgaacaacccctaccgacctacctgcaaaagatcagctgactgtatgcagtccaaatgtgggagctggcttgcctgcgcccacagatgaaagccacgttctgaaaatatcatgcaatttgttgctaactcttaacgcccattgaaaccaccgctgcgccgccccatctaacctccatacttccttatgcaggtgccccatgagcgaccagcaagccttccctgattacgacttgaacgactacgccgaccccgaacacgcggatgaggaggcgtcctcgagcaccggcctggccctgcccgggcaaaacctgccggacaaggtctacatcatcccgatccacaaccgcccgttctttcccgcgcaagtgctgccggtgatcgtcaacgaagaaccgtgggccgagacgctggagctggtgagcaagtccgaccaccattccctcgcgctgtttttcatggaaaccccgccggaagacccgcgccacttcgacacctccgccctgccgctgtacggcacgctggtgaaggtgcaccacgccagccgcgagaacggcaagctgcagttcgtcgcccaaggcctgacccgcgtacgcatcaagacctggctcaagcaccaccgtccgccgtacctggtggaagttgaatacccgcaccagccgacccagccgaccgacgaggtaaaggcctacggcatggcgctgatcaatgcgatcaaggagttgctgccgctcaacccgctgtacagcgaagagctgaagaactacctcaaccgcttcagccccaacgacccttcgccgctcaccgacttcgccgccgccctcacttcggcgacaggtaatgagctgcaggaagtgctggattgcgtgcccatgctcaagcgcatggaaaaagtcctgccgatgctgcgcaaggaggttgaagtcgcgcgcctgcaaaaagagctctccgccgaggtgaaccgcaagatcggcgagcatcagcgcgagtttttcctcaaggaacagctcaaggtcattcagcaggagctggggctgaccaaagacgaccgcagcgccgacgtcgaacagttcgaacaacgcctcgtcggcaaagtgctgccgccccaagcgcaaaagcgcatcagtgaagaaatgaacaaactgtcgatcctggaaacgggttcgccggaatacgccgtgacccgcaattacctcgactgggcaaccgccgtgccttggggcgtatatggcgaggacaaactcgacctgaagcacgcgcgcaaggtgctggataaacaccacgccggcctggacgacatcaagagccgcatcctcgagttcctggccgtgggcgcttacaaaggtgaagtcgccggttcgatcgtgctgctggtcggcccgcccggcgtgggcaagaccagcgtgggtaaatccatcgccgagtcgctgggccgcccgttctatcgcttcagcgtcggcggcatgcgtgacgaggccgagatcaagggccaccgccgcacctacatcggcgccctcccgggcaagctggtgcaggcgctcaaggatgtggaagtgatgaacccggtgatcatgctcgacgagatcgacaagatgggccagagcttccagggcgacccggcgtcggccttgctggaaaccctcgacccggagcagaacgtcgaattcctcgaccactacctggacctgcgcttggacctgtccaaggtgctgttcgtgtgcacggcgaacaccctggattcgatcccgggcccattgctcgaccggatggaagtgattcgactgtcgggctatatcaccgaagaaaaagtcgccatcgccaagcgccatctgtggcccaagcagctggaaaaagccggcgtgtcgaagaacaccctgaccatcagcgacggtgccctgcgtgcattgatcgacggctacgcccgcgaagccggggtgcgccagctggaaaaacagctgggcaaactggtgcgcaaggccgtggtcaagctgctcgatgagccggattcggtgatcaagatcggcaacaaggacctggaaagctccctcggcatgcccgtgttccgcaacgagcaagtgctctccggcaccggcgtgatcaccggccttgcctggaccagcatgggcggcgcgaccttgccgatcgaggcgacgcgcatccacacgctcaaccgcggcttcaagctcaccgggcagttgggtgaagtgatgaaagagtccgctgaaatcgcctacagctacatcagctccaacctgaagtcgtttggcggtgatccgaagttcttcgatgaagcctttgtgcacttgcacgtgccggaaggtgctacgcccaaagacggcccgagcgcgggcgtgaccatggccagcgcgctgttgtcgctggcgcgcaaccagccgccgaaaaagggtgtggccatgaccggcgagctgacactgaccgggcatgtactgccgattggcggcgtgcgcgagaaggtgatcgcggcgcggcgccagaagattcacgagctgattctgccggagcccaaccgtggcagttttgaggaattgccggattacctgaaggaaggcatgacggtgcactttgccaagcggtttgcggatgtggcgaaggtgctgttctgatcgttaggtaacgcctggcctggcctcatcgcgggcaagcccggctcccacagggatcggtgttgttgatgacaaatcggtcaaatgtgggagcgggcttgcccgcgatggcgttcgtcgcaacaacacaaatcccgcttgtcacaccttgtctcatcttcggttatgctcgcccttcgtcgtgaatcaacggagcccccatgaccgctgcccgcctgtttctccccttgagcctcgccctgctggccgcgtgcgccagtacgccgaagcaaaatgtcaccgtggaagaccagagcgcctgcccgcttcagcttaaaaccgggcaaaacctgattctcactctgccgagcaaccccaccaccggctaccgctgggccatccaggattccgccggcggcgtgctgcgcgcgttgagccctgaggtttacagcagcaccgaatccggcgtggtcggcggtggcggtcagtcgacctggcgcttccaggcgtttgccgcaggccaggggcgcctgcgcctgacctcccagcaaccttgggaacctgaagccgaacctgccgaaaccttcgactgcgccatcacggtgaactgatatgccatggctgattcttgcgttgatgggcgccggcacctttatctacggcctgagcacccatgcggcgctgctgtgcctgttggtcaaaccgctgccggtactggcgctgctgggctggctgcatgatgcgcctcccactgactatcgacgctggatcagcctggggctgattttttccctggtcggcgatgtgctgctcgcttggcccggtgacctgtttatctttggcctgggcgcctttttgtttgcccacctggcgtacctgaaagcgtatttcagtgactgccgccgtttggccgtattgccactgatattggcgctgggcgtgggtgccattctgctgagcatcctgatcgcccacggcctgggcgaactgctgattccggtggtggtttatgcgttggtgatcagcgcaatgctctggcgggcgctggcgcggctgggcagtgaagtgcccaaacagtcggcgctgctggcggcggcgggcgcagtgtcgtttgtgttctccgacacgctgattgggatcaatcggtttgtggtcgcctttgaggcggcaccttatttgttgatcgccacttactggcttgggcaatggggcatcaccgcctccgcgttccatcagacaacccgcgcacgcgagggccaatttggctaaaatgccggcctttccccatcaatgccggaacaaccgtgagcaaagaacccgatcgcctattcgcccagcccctgcctcaggtgccggacttcgcctttaacgaggacgtggtgcgggtgttcccggacatgatcaaacgctcggtgccgggctacccgaccatcgtcgagaacctcggcgtgctcgcggctcagtttgcccagccggggagcgtgctctacgacctcggctcatcccttggcgccgtcacccaagccttgcgccgccatgtgcgcaccgacggctgccgggtaatcgcggtggataactcggcggcgatggtcgagcgttgccgcgagtacctcaatggccaggattcgatgtttcaagagttgctgccggtcgaggtgatcgagggcgatatcctcgcgcttcagttccaaccggcctcggtggtggcgctgaacttcaccctgcaattcatcgcgcccgatgagcgcctggcgctgctctcgcgcatccgccaatcgctgttgccgggcggtgcgctgattctgtcagagaagctgcgcttcaatgacgccgaagagcacgccctgctgaccgacctgcatatcgcgttcaaacgcgccaacggctacagcgaactggaaatcgcccagaagcgcagcgccatcgaaaacgtcatgaagcccgacagcctcgaagaacaccgcgaacgcctgctggcggccgggttttcgaaagtcgtgccgtggttccagtgtcttaactttgcctcgttgattgccttgccatgattgatctgtcccccctcgcccgccatctggtcggcacccctctggctgtatgggcccagggcctgcaagcgcaactcgatagcaaaatggaaaagggccatggcgacctggagcgctggcagagcgcactggatgcattaccaaagatccagcccagcgaagtggatttgctcaacggcctgacactcgatacagactgcgacgacgccacccgcgcgcaaatgcacaccgcgctgatggggttgagcccatggcgcaaagggccgttcaacctgttcggcgttcacgtggacaccgagtggcgctcggactggaagtggtcgcgagtggcaccgcacttgaacttgaaaggcaaacgcatcctcgatgtgggctgcggcaacggctactacatgtggcgcatgctcggcgccggcgccgacagcgtgattggcgtggacccgaactggctattcttctgtcagttccaggcggtacagcgttacctgtcagaacccaaggcctggcacctgcccttcccgttcgaagacctgccggcgaatctggaaggtttcgacacggtattttccatgggcgttttttatcaccgtcgttcgcccatcgagcatttgctggcgttgaaggacaccctggtcaaaggcggcgagctggtgctggaaaccctggtggtggaaggcgatcagcagcaagtactggtgccggaagatcgctacgcgcagatgcgcaacgtgtggttcctgccatcggtgccggcgttgatgctgtggctgcgccgcgcggggttcagtgatgtgcgctgtgtggacgtgagcgtgaccacggtcgaggaacagcgcgcaacggagtggatgaagtatcagtcgctgagtgacttcctagaccctgaggatcacagcaagacgattgaagggctgccggcgccgatgcgggcggtgatcatcgccaggaaataaccccactccatctgaataaatgaagatcaaaggtgggagctggcttgtggcttggcgcggcgcgctttgaagaattcgcttagaacagccccacactcttcagccagcacccccccctcatacaacacccgatgattcaaaaagccctgggtaaaaaactgcccctggctttgcacaattcccgccttgggctccagcgccccgtacaccacccgcgcaacccgtgaatgcacgatcaacccggcgcacatgctgcacggctccaacgtcacatacaacgtgctgcccaccagccggtaattgctgatcgcctgcgccgccgcgcggatggcgaccatctccgcgtgggcgctggggtcgttgccactgatcgggcagttgaagccacgcccaatgatttcaccgtcctgcaccagcaccgcgcctaccggcacttcgcccagtgctgcgccctgggcggcgagggccagggcttcgcgcatgaaatcctggtcacggctgcggtcgataatggtggcggggcgaatctggcgcatcacgccacctcgatggcggccatcaggccggtttccatgtggtcgatcacgtggcaatggaacatccacacccccgggttatccgccaccagcgccacgcgggcacgctcgtttttgccaagcaggtaggtgtcggtgaagtagggaatcaccttgtgacggtttgaggcaatcaccttgaagctcatgccgtgcaggtgaatcggatgctggtactgggtcatgtttttcaattcgaagatgtagcttttgcccttctccagtttggcaatcgggcggtcggcgcaggttttgtcggtgatgtcccaggccttgccgttgatttgccacaggcttggcggcttgccgtcatcaacagaaacggagccgacccattcgaaattgaagttgagtttctcggcattggccaggtccggctcggcgatcgggttggcgggcaacgcgggtggccattcggagggcgcatcggtgctggccaccgaacggaaagtccccaggcgcacaggcccattgcggatggagagctcttcgccggccggcggtgccttgattgccaggcaaatgcgcatgcccgggcccagccagtattccttgcccagcgggcgcggttcgatgggattaccgtccagcgcgtagatctgcgcttcgacgtccggaatgttgatgcggtaggtcagggtgttgtcgaggttgagcaggcgtacgcgggtgatctgcccggcgggcaaatcgaccaccgcctgcggtacgccattgatcgtcgacagccgcccggccgtgccgccacgcgccgcttcacggggcacactgaaggcgacaaaggcgccttcttcgtccacatgccagcttttcaggctcagcgtacgctcgtgcttgaaaccggtaggctcacgctcttcgatgatcagcgggccgaccaggccccggccgagttcttcgctgctgttcacgtgggggtgataccagtagctgccggcgtcgggcacgcggaatttgtagtcgaagtattcaccgggcagcaccggcaattgcgagacgtaaggcacaccatccatttccagcggcaggcggatgccatgccagtggatggtggtggcgactggcaggtggttgataaagcgcacccgcagccattcgccctggcgtacgcgcaactcggtgcccggcgccgaagggccgaacgcccaagcttcggtcttgtggcccggcaccagttccacgtccaacggcgcggcaatcagctcgtaatcgtgcccggcctcagcctcggcgactttccccaaccagtagcggtaggcaccaccggcaccgacgcccactacggccaggcctgcaagaccacccaggatttgtcgacgggaaaaggatcgggacacaacaacctcacgtatctgctgcgggccagggcctgcaaagggcagatacgatacacctgcatcggctaaacagtaagacttcgcattgccgcatgccaaattcactgcggactaatgtgggagctggcttgcctgcgatagcggtaggccagccaatacatgtgctgactgatccaccgtcatcgcaggcaagccagctcccacattgttgatcttcagtgttgtttagactgtgtttgttcaggctttggcagcggccaggatcagcgctttcatctcggccacagcgcctttgaaaccgacgaacagcgcatgggccaccagagcgtggccgatgttcagttcgttgatgcccttgatcgcggccacggcctcgacgttgtggtaatgcaggccatggccggcattgacgatcaggccttccttgagcccgcagttcacaccctcgatgatacgttgcagctcatcggccacttcagtcggcgtggtcgcatcggcgtaacggccggtgtgcagttcgatagccggcgcaccgacccggcgcgaggcttcgatctggcgttcatcggcgtcgataaacagcgagacttcactgccgagcttcgacaggcgttccactgcggccttgatccgcacctcctggccggccacatcaagcccgccttcggtggtcagttcctggcgggtttccggcaccaggcaaatgtgcgccgggcggatgcgctcggcgaactgcatcatttcctcggtcacgcccatttcgaagttcatgcgggtttgcagcacatccttgagcagcagcacatcgcgctcctggatgtggcggcggtcttcgcgcaggtgcacggtgatgccgtcggcgcccgcttcttcggcgtccagcgcggccttgaccgggtcagggtaacgggtgccccgggcctggcgcagggtggcgacgtggtcgatgttgacgccaagaagaatgcgattgctggtggtcacggaagcgctcctgaaaagggatagaaacgccgcacagcatacacggggttgtcagggctttcgaaacaactcgcgactgaccagcggccgtccgcccaagtgcacggccagggcctggcgcatcaggcgtttggcagcggacaaggcaccgggcgctgtccagtcggcttcgctcatggccaacagctcggttccctggaacaggccgggttgcagcaggtacacgcgctcaaggcccgcatcgacttgcaggcggtacatgccgtcggcggcgacaggatcgccatgcaggtcgttggccagttcgaagccgtagcccaggtcgtcgagcaggcgccattcgaaagcacgcagcagaggctccaatgggcggccttcggccagggctaacagggtggcggcgtagtgatcgaagacctctgggtgcggatcctcggcgggcaacaggcggatcagcagttcgttgaggtagaggccactgaacaaggcctcgccattgagccaggcgctggtgccgacgctttccatgcgccccacgtttttcagctcgcccttgccacgaaactccacgtccagggccacgaacggccgcgccaatgtacccgccttgccccgtgcgctacgcaagactgcgcgcaggcggccttggggcgtgaggaagtccaccagggcgctggtctcgcggtaggcgcggctgtgcaggacgtaggcgagttggctggggggtggggattgggacatggcagtctcttcgcggaacttaagaacagcgataaaccaatgtgggagcgggcttgcccgcgatgcaggcaactcggtcgttcagttacaccgagctgatgctatcgcaggcaagccagctcccacacaagccggctcctacagggggaacagggtgttacaggtcgccgtagcccagcgagcgcagtgcgcgctcgtcgtcggaccagccacccttaaccttcacccacagattgagcatgatcttggaatcgaacagcaattccatgtccttgcgcgcttcggtgccgatgcgcttgatgcgctcgcccttgtcgccaatgatgattttcttctggccgtcacgttcgacgaggatcagcgcatggatgtgcagggttttgccctgctgcttgaactcttcgatttcaacggtgatctggtacggcagctcggcacccatctggcgcatgattttctcgcgcaccagttcggcggcaaggaagcggctgctgcggtcggtgatctggtcttccgggaaaaagtgctcgttctccggcaagtgctcggcgatcacgcgctccagggcttcgaggttgtggccgtgctgggccgagatcgggatgatctgggcgttcggcagttgctcctgcagccagctcaggtgcggcatcagctcggctttgtcttcgatgcggtcggtcttgttcagcgcgacgatcaacgggccggtgacgtactgcacacgctcaagaaccatctggtcttcgtcggtccacttggtgcggtcgaccacgaagatcaccacgtcgacgtctttcaacgctgccgaagcagttttgttcatgtaacggttaagggctttctcgccgcctttgtgcatgcccggggtgtcgacgtagaccgcttgcacggtgccttcggtcttgatgcccagcatgttgtggcgggtggtctgaggcttgcgcgaagtgatcgcgagcttctggccgaggatgtggttgagcagcgtggacttgcccacgttcgggcggccgacgatggcaacatagccacagcgtgttgcggttgtatcagtcatggccattctccacgcccagggcaatcagtgctgcagcggccgctacctgttcggcaatacgacggctcacaccctgtcctcggcttttttcattcaataaggtgatttcacattccacgaagaacacgcggcaatggggctcaccctggatatccaccacttcgtagcgtggcagttcgcaaccacgggactgcaggtattcctgcaggcgggtcttgggatctttgttggtgtcgaccagtgtcaggctttcgatctccgacgccagccaggcgaccacgcgctccttggccgtctccatgcctgcgtcgaggtagattgcaccgatcaaggcttccagggcatcggccagaatcgactcgcgacgaaagccgccgcttttcaattcaccggaacccagccgcaggtattcgcccaggccgaaaccacgggcgagcacggccagggtctcgcccttcaccaagcgtgcacgcaagcgcgacagctggccttcgcgcgcttgagggaaacgctcgaacagcgcctcaccggcagcgaagttaaggatggcatcaccgaggaattccaggcgttcgttgttacgccctgcaaagctgcggtgtgtgagggcaaggaccatcaattcctggtccttgaaggtgtagccgagctggcgctcgagacggcttagagaaacgctcacggtttacccatatctgtttggtggcaccggcggccatcgacgattgacgcagtgttcaaattcaaatcctgattggtgcagcaaggggccgggacaatgactgtcccaaccccagaaaagcattcggcgctgtgttcacagcgccgcctgtattacttgatcagcccgacccgcgagaagttcggcaggtggctcagtttgggttccggccagctcatccagactgcgaaggccttgccgacgatgttctcgtcgggaaccatgcccagcaggtccttgggaatattgggatcatcccagtaacggctgtcgttggaattgtcccggttgtcgcccatcatgaaatagtgcccggcaggcactttccactcgccatcaggcattgcacggtagcggctcatttccttgcggatttcatgctcgaccgtgccgagtttttcctggtaaagctcggcgctgcccaaagtgttcggctcggtgccgatcagtttctcggccaccgactcaccgttgacgaacagacgcttgtcgctggtgtagcgaatcacgtcgcccggcaggcccactacacgcttgatgtagttgacgttcgggtcgctcgggtaacggaacaccatcacgtcgccgcgttgcgggtcacccaccggaatgactttcttgtcgatcaccggcaagcggatcccgtaggaaaacttgttcaccaggatgaagtcgcccacgtccagggtaggtttcatcgaccccgaagggatctgaaacggctctaccaggaacgaacgcagcaccagcacgatgaacaacaccgggaagaacgacttgccgtattcaaccagcaaaggctctttgttcagcttctcgacgaccaccgcatcgggctggctgacgctgccctgataggaggcgatagccgcccgccgacgcggggcgaagaacaccagatcgagcaacgccaggaggccgcaaacggcgacagcgatgaccagcaacagcgggaaatttagtgacataggacctaactatccaacctgagcaccgcaaggaaggcttcttgtggaatttccacgttgcccacttgcttcatgcgttttttaccggccttttgcttctcaagcagcttgcgcttacggcttacgtcaccgccgtagcatttggccagtacgttctttctgagtgccttgacggaggtccgtgcaatgatctgcccgccaatggcggcctggatcgcgacgtcgaacatctggcgcggaatcagttctttcatcttttcggtcaactgccgacctttgtagtgcgcgttgtccttgtgcacgatcagtgccagtgcatctaccttgtcgccgttgatcagcacatccagcttcaccagattagccgattggtaacgatcgaaatggtaatccagcgaagcatagccgcgactggtggatttgagacggtcaaagaagtccaggaccacttcgttcatcggcaagtcataggtcacttgcacctgggtaccgaggaacaacatgtcgtgctgcacgccacgtttttcgatacacagggtaatcacgttgcccaagtgctcctgcggtaccaggatgttggcccgcacgattggctcgcgcatgtcttcgatagaggacagatccggaagcttggacgggttgtcgacgtaaatcgtttcaccggttttcagcgccagctcaaaaataaccgttggcgcagtggtgatcaggtccaggtcgtattcgcgctcgagacgctcctgaatgatctccatgtgcagcatgccgaggaagccgcaacggaagccgaagcccagggcgtcggagctttccggggtgtactgcaacgacgagtcgttgagggtcagcttttgcagggcttcgcggaaatcctcgaagtcatcggagctgaccgggaacaggccggcgtaaacctgcggctggatacgtttgaagcccggcagcacgtcaacgtcaggggtggagctcaaggtcagggtgtcaccgaccggtgcgccatgaatgtccttgataccggcaatgatgaagcctacttcaccggctttcaggtcaacggttgccgtgtgtttcgggttgaatacacccacgctgtccaccaggtggatcttgccggtggatttgacgaggatcttgtcgcccttcttcacacggccgtggcgcacgcgtaccagggacacaacgcccaggtagttgtcgaaccaggagtcgatgatcaacgcttgcagcggatcttcgtagttgccggtaggcgccggaatggtcttgaccaggcgctcgagcacctcgtcaacgcccaggccggtcttggcgctgcactcgacggcgtcggtggcgtcaatgccgatgattttttcgatttcttctttcacgcggtcaggatcggcctggggcaggtcgatcttgttcagtaccggcatgacctcaaggccctgctcgatcgcggtgtagcagttggcgacagactgggcttcaacgccctggccggcatcgaccaccagcaaggcaccttcgcaggctgccaacgaacggctgacttcgtaggtgaagtcaacgtggccgggggtgtcaatgaagttcaactggtacttgataccgtctttggcggtgtagtacagggtaacgctgtgggccttgatggtgatcccgcgctcgcgttcgaggtccatggagtccaggacctgggcttccatttcacgctcggcaaggccgccgcacatctggatgaatcgatcggccagcgtcgacttaccatggtcaatgtgggcgatgatggagaaattgcggatatgactcaaatcactcacggatcaacactcaaaaaggctgcaggcagattgcccgctgaaaaatagccgggaattgtacctgatgctcaggccagacgtcatctttgctgaccagaacaaaaatgccccgatctcttgaacggggcattttttgttcataagcgtgacgtcagccggctctgcgcaacagccagaaccctgccaacgcacagatcgtggtcggcaccagcaccgcaaacagcggcgagaaaccgaacaccaggctcgacggcccgagcagatcctgggcgatacggaaggtaaagcccaccagaacgccggtaaatacgcgctggccgagggtcacggaacgcagcgggccgaagatgaatgaaatcgccatcaacaccagcgccgcggtgaccaccggctgcaacaccttgacccagaatgccagccaatagcgcccgttgttcaagccctggtccttgaggtagtggatgtagctccacaacccggagatcggcaggctttccgggatcatcacgactgtattgagcagttccggcttgagggcgatatcccacgcctcggtcggcacgttgatgacttcggtgtaagccttggtgccctgccccacattgcggaaataggtcgtggtgacctcgctgagcaaccacttcgcgtcgttgtactgcgcgcgcttggcgaagctggaggtcaacatgtggcgttctttgtcgaacgtgtagcgggtcacaccaatcaacaggccgcccggttgcacggcgttgatgtggataaactcgtcaccctgacggtgccaaaggccatgcttggcgctttgcgcgtcgcccgacccctgggccagggcgcggttggcctgagcagtggcttcggtcggtggcgccacatattcaccgatcaatacactgcacgccatcagcaacagcattggcttcatgaccgcccaaacgatgcggccgatggagacgcccgccgcacgcatgatcgtcagctcgctgttgctggccagactgcccagaccgataaggcagccgatcaggccggccatcggcatcatgtcgtaaaggcgacgcggagcagtcagtgccacgtagctcaatacatccgtaacggtgtaagtgtcagtaacgttgcccacttcatcgatgaaggcgaacaacgacgccaagccgaggataatgcccaacaccgccagaatggcgatcagtacgctgctgccaatgtagcgatcgagcttagtcacgcgccaactccttcaggccacgacggctcttcattttcaaacgtatgggctcccaataaagcagccccaggccaatcagcaggaagatgcagtgcacccaccacaggccgatgatgggtgacagcttgcccttttcgagggagccacgggcggaaatcaggatggtcaggtaggccatgtacagcaggatcgccggcaacagtttgaggaaacggccctggcgcgggtttacccgggacaacggcacagccatcaaggtcacgataaacaccagcagcggcaaggagatacgccattgcagctcggcgatggaacgcaattcctggctgccgaaaagcgaggctgtggggagcgcgtcgcggtcagtgacttcttcactgatttccgggcgagccagcattacgccataagtgtcatatttgattgcccgataattcgccagacccgggctgccgtcatagcgatagccgttttccaggaccaggtaacgggtgccgtctggacgcacgtcctggcgcccggtgctggccaccagaatcgaaataccgcgatctttctggttatcaccgaggtttttctgggaaatgaacacgccgcccaggttggcacggtcatcggtcatggtttcggtgtaggtcacccgggtaccgtcgttcagcgcctggaagcgccccggctccagggtgtcgaattccgtcatcgcgtcctgtttgttcaacagcaactggaactgcatggcgccctggggggcaaggctcatgctcaaccaggccaccaccagggcaacaccggtggccggcaccatggtcatggccagcagacgctgctggctcatgccggtagccgacagcacggtcatctcactttcaaggtacaaccggccataggccagcagaatgccgagaaacaggccgagcggcagaatcagttgcaaaaagcctggcaggcgaaagcccatgatcaggaacaacgagcccggatccagggcgcccgaggccgcctgggcaaggaatttgacgaaacgaccactcatggtgatgaccagcagcaccgcactcacggcactcagggtcaacaggacttcgcgggacagataacggaagacaatcaaaccagacactccagggttgtcaggctaaggcggccaaacaagcaagcataccgagtcggcccgtttacacggaccggctaaaaagatggcgcattatcctgtgattgaccgcgcctgtcacggagcttgctcatgcacgtgcacaaagcgtgaggcaagggttgtcaggctttgcttgcgaggttcaaactgcggcctttgtcgcgggcggtttacaaagctgccgagcatcaaagcctgcgtacagacgccaggctcacagaccttaaataagggacccgaaaatggaattggttgtaaaaagcgttagccccgaaacgttgaaaaccgccaccctcgtggtcgctgtcggcgaaggccgcaagctcggcgtcgccgccaagcaactggatgaactgagcggtggcgccatcagcgcgatcctcaaacgcggtgacctgtccggcaaagtcggccagagcctgctgctgcaaagcctgccgaacctcaaagccgaccgcgttttgctggtgggcgtgggcaaagacaccgaactgggcgaccgcccgtttcgcaagatcatcagcggcatcctcaataccctcaagggtctgggcggcagcgatgcggcattggcactggatgaagtcgtcgtaaaaggccgtgacagctatggcaagacccgcctgctggctgaaagcctggtagacggtggctacctcttcgaccagttcaagagcaccaaggccgaaccccgcgccctgaagaaaatcaccctgctgaccatcaaggcggcgcaggccgaagtcgagcgcgccgtgactcacgcgacggcaatcgccaacggcatgtcgttcacccgcgacctgggtaacctgccgccgaacatctgccacccgactttcctcggcgagcaagccaaggcactgggcaaagagttcaagggcctgaaagtcgaagtgctggacgagaagaagatcaaggaactgggcatgggctcgttctatgccgtgggccagggcagcgaccagccaccacgcctgatcgtgatgcaatacaacggtggcaagaagtccgagaagccttacgccctggtcggtaaaggcatcaccttcgacaccggcggcatcagcctcaagccgggcctgggcatggacgagatgaagtacgacatgggcggcgccgccagcgtgttcggtaccctgcgtgccgtgctggagctgaagctgccgatcaacctggtgtgcatcctggcctgcgccgagaacatgccgagcggcggtgcaacccgtccgggtgatatcgtcacgaccctgagcggccagaccgttgaaatcctcaacaccgacgccgaaggccgcctggtactgtgtgatgcactgacctacgccgagcgcttcaagccgcaagccgtgattgacatcgccaccttgaccggtgcctgcatcgtcgccctgggttcccacacgtcgggcctgctgggcaacagcgacgagttgatcgagcaactgctcagcgccggcaaagcagccgatgaccgcgcctggcaactgccgctgttcgatgagtaccaggaacagctggacagcccgttcgccgacatcgccaacatcggcggcccgaaagccggcaccatcaccgctgcctgcttcctgtcgcgttttgccaaaaacttcaactgggcgcacctggacatcgccggcacggcctggaccagcggcggcaaggacaagggcgcaaccggccgtccggttcccctgctgacccaatacctgctggaccgcgccaaagcctgaaactgatgacgccggggcggcttcatggccgccctggtctcaggaaccgcaatgacccaagtcgacttttatatattgcccagcgccgacccgctcgcgcgcctggactttgcctgcaagctcaccgaaaaagcctggcgcatgggccaccgcatctacctgcactgcagcgatgccgcccaacgtgacgagctggatgcccgcctgtggcgtttcaagggcgaaagctttgtgccccacggcccggctgaatccgaacccgaaggcctggtagtgctggggttgggtgacaattgcggcgaccacgctgacctcttggtcaacctggacctgaaagtaccggcctttgccaaggcttttgcccgcgtggcagaggtagtggtggaagacccggctattcgtcaggccgcgcgggagagtttccgtttctaccgtgaacagggctatcctctgcaagatcaccggctacaacgactctgagtacgcgatggacactcccaaccctataaaaaaagacgaccacctgctggatgaccttgagtcgatccgccagttgctcggtgatgatggcttgcaaccgccgctgctgaccgaaacggtcgatggcgaggtacagataccgcttttgtttgacatggtgggcggtaaacctgcggcgccggagcctgtggccgccgagcctgcccccgccaaaaaaaaagggcctgacgccctgctgttgcacctggacaacgaactgcgcgccgccgcgcaactgatcatgcaagacgtgatcgacgactttgccccgcatatcgaggccgaaatcaaacggcgaatggatgcgcggatggagcgcttgctcagccaataccagtcctgaggtgggcatagatctcctgtgggagctggcttgcctgcgatagcggtgtatccgtcactgatgagttgactgacagatagctatcgcaggcaagccagctcccacattggtttgcatcgacctttaggccgtcttcaactcgccctcctcgccctgccccgttatacttgccggctttcctgaataaatgccaactagggtcccgccgcgcatggataagacctaccagccgcacgctatcgaaacttcctggtaccagacctgggaatccgagaattatttcgccccgcaaggcgcgggcgattcctacaccatcatgattccgccaccgaacgtcactggcagcctgcacatgggccatggcttcaacaatgcgatcatggatgcgttgatccgtttccgccgcatgcagggccgcaacaccctgtggcaaccgggtaccgaccacgccggtatcgccacccagatgctggtggaacgccaattggaagccactggccagaaccgtcacgacctgggccgcgaaaaattcctcgagaaaatctgggaatggaaagaccagtccggcggcaatatcagccgtcagatccgtcgcctcggctcgtccgttgactggacccgcgagcgcttcaccatggacgacggcctgtccgaggccgtgaaggaagcttttgtacgcctgcacgaagatggcctgatctaccgcggcaagcgcctagtcaactgggacaccaagttgcacacggcgatttccgaccttgaagtggaaaaccacgacgagaaaggcttcctgtggaacctcaagtacccgttggccgacggcgccaagacggctgaaggcaacgactacctgatcgtcgccaccacccgtccggaaaccatgctgggtgactccgccgtcgccgtgaacccgcaagacgagcgctacaaggcgctgatcggcaagttcgtcgaactgccgctggtaggccgtcgcatcccgattatcgcggacgactactgcgaccctgaattcggcaccggctgcgtgaaaatcaccccggcccacgacttcaacgactacgaagtcggcaagcgccacaacctgccgctgctgaatatcttcgacaaaaacgccgttgtgttgccggcctgccaggtgttcaacctggacggctcgctgaacgacagcgtcgacggcaagattccggctgaattcgccggcctcgaccgtttcgaagcgcgcaagcaaatcgttgctgcctttgacgccgccggcctgctgatgagcgttgatgaccacgccttgaaagtaccgaagggcgaccgctccggtaccgtgatcgagccgtggctgaccgaccagtggtacgtctccaccaagccgctggccgagcctgcgattgctgcagtagaagacggccgcattgcgttcgtgcctaaacagtacgaaaacatgtacttctcgtggatgcgtgacattcaggactggtgcatcagccgtcaactctggtggggccaccgcattccggcctggtacgacgagtcgggcaaggtctatgtaggccgtgacgaagccgaggttcgcgccaagcacaacttgcccgccgacctggtgttgaatcaggacaacgatgtactcgacacctggttcagcgccgggctgtggacgttctccaccctgggctggccggaaaaaaccgagttcctcgaaaaattccacccgaccgacgtccttgtcaccggcttcgacatcattttcttctgggttgcccggatgatcatgttgaccatgcacctggtgaaaaacgacgacggcaccccgcaggtgccgttcaagaccgtgtacgtacacggcctggtgcgtgatggccagggtcagaagatgtccaagtccaagggcaacgtccttgacccgctggacatcatcgacggcatcgacctggaaaccctggtgcagaaacgcacctcgggcatgatgcagccgaaaatggccaagaagatcgagaagcagacccgcgacgagttcgaaggcggcattgccagctacggcactgacgccctgcgcttcacgttctgctcgctggcgtccaccggtcgcgacatcaagttcgacatgggccgcgtcgaaggctatcgcaacttctgcaacaagatctggaacgcggcgcgctacgtgctggacaaaggcgaagactgcggccagaacggcgaagcctatgagctgtccctggcggatcgctggatcatctcgcaactgcagcgcaccgaagccgaagtgacgcgccaactcgaccagttccgcttcgacctggccgcgcaagccctgtacgagttcatctggaaccagtattgcgactggtacctggaactgtccaagccggtgctgtgggacgaaaactcgccgatcgaacgccagcgcggcacccgccgcacgttggtgcgcgtgttggaagtggccttgcgcctggcacacccgttcatgccattcatcaccgaagaaatctggcagcgcatcgcgccgctggccggtatcgaaggcaagaccatcatgctgcaaccttggccggtggccaatgaagcgcgcattgatgaggccgccgaaagcgatatcgaatggctcaagaccctgatgatgggcacgcgtaacattcgtgccgagatgaacatcggcccgggcaagccactggcagtgttcgtcaagaacgccagcgccgaagaccagcgccgcctcaccgaaaacgatgcgctgctcaagaagctggcaaagctggagtcgatcactgtattggctgccggcgccgaggcaccgttgtccgcgaccgcgctggttggcgagatggaagtgctggtgccgatggccggcctgatcgacaaaggcgctgaactggcccgcctcgacaaggaaatcgcccgcctgcagggcgaagtggcacgcgtgggcggcaagctgtccaacgcggcgttcgtcgacaaggcgccggctgaagtgatcgagaaagaacgcgccaaactggccgaggccgaacaggccctgggcaagctggcggagcaacatgcgcggatttccagcctgtaagccggaacctgtgtgaaaaagagaccttcgggtctctttttttatgcctttttgtgggagctggcttgcctgcgatgcaggcaactgggtccatcaagcagaccgaggtgatgccatcgcaggcaagccagctcccacagttgaccgagtaaggcccaagatgtgtgacaatgcccaccactttgagccaacaccagaatcaacatgaccgcccccagcacgccaaaacctccgcgcaagaagcctgaatccgctacaccggccaaaccgcctgtgccgcgcaaagaggccaccctgcacccgcgcaaccgccatacgggccgatacgacttcccggcgctgatcaagaccacgccggaactggcgaaattcgtgatcatcaatccttatggcaaagagagcatcgacttcgccagcccggatgcggtgcgggtgttcaaccgggcgctgctcaagtccttctacggtattcagcactgggacatcccggccgactacctgtgcccgccggtgccaggccgtgccgactacgtgcacttcctcgccgacctgctcgccagcgtcaacgacggcaagatcccgcggggttcgatcgtcaaggtgctggacatcggcatgggcgccaactgcgtctacccgctgattggctacatggagtaccgctggaacttcctcggctcggaggtcgaccctatcgccgtggccgccgccaaggccatcgtgcagtccaatgacctgagcaaggttattcaactgcgccagcaaaccaaccccaaacagatcctgctaggcttgctggagccgggcgagcgctttgacctgactatgtgcaacccgccgttccacgcgtccatggacgaggccaccaaaggcagcgaacgcaagtggcgtgccttgggcaaagcagacccgaagcgcaagttgccggtgttgaacttcggcggccaatcggccgaactgtggtgcgaaggcggcgaagcgcggtttgtgacgcaactgatcgccgagagtgcgcattttgcccacaaggtgctgtggttcagcacattggtgtcaaaagcgtcgaacctgcccgcgatcgagaccgccctgaaaaaagccggcgtgctggaaagccaggtggtggagatgtctcagggccaaaagcaaagccgttttgtggcgtggacgttccagaccaaaaacgaacagcagatctggcgccagcgctgggtgcgcgactaaatctgcggtgggcccgcttactgtggtagcccgctttctgtggtgagcgggcttgccccgcgctgggctgcgcagcggccccaaaacctggcaacgcgttttgtctgacaggaatgcggtgtttgaattggggcggcttcgccacccaacgcggggcaagcccgctcaccacaaaggcaggtgccaaccggtaaaagctattcaagggccagttcaaatcgcaggcaacaaaaaaccgcgcccggatcgctccggagcgcggtttttttgctgcgtcttacttgttaacagcgtcggtcaggcctttggccacaaccagcttgataactttcttggcagcgatttcgatggcagcgccagtcgaagggttacggccagtacgggcaggacgctcggtcactttcagtttgccaacgcctggcagagtgatttcgccgccgttttccagctgatcagcaacgatctggctcagttggtccagcagagcgcgcacggtggtcttcggtgcgtctactgcttcagccaggtcagcgatcagttggtctttagtaatagccattgtggtgttccttccctatcaaattcatatggattgcagagtgcagtgtcagccgtcgagcccgaccgtcatggcctggcacccccggctataaccacggagatcggggttatagatgcttgaaacggggattggttcgacctgacagatgctgaatgcacgcttaacgccgagacttggcgtaagacggggcaaaactagcacagagacggggaaatatccgcttctacctagccatttggtcagctttatcgctctaaaccgtgaaaaaaaggaatatcgcccgtcggaggtcgcccaaaacagccttccaggcgtgtcttggccaacgggtgcggtacactgggcgacttttcggggaggccacctgctccccttcaaccagccgagaagcctatgccgatccgtcattgcatcgtccacctgatcgacaaaaaacccgacggcacacccgcagttctccacgcccgcgactcagagctgtctgagtctgccgccatcgagaacatgcttgccgacctcaacgagagctacaacgccaaacaaggcaaggcctggggtttcttccatgccgagtccggcgcgcacccgttcagtggctggttgaaggagtatttcgacggtggccaggatttcaccaccttcagccgtacggcggtcgagcatctgcaaaaactgatggaagagtccaacctctccaccggcggccacgtgctgtttgcgcactaccagcaaggcatgaccgactacctggccatcgccctgctgcaccacagcgaaggcgtggcggtgaccgacgagctggacgtgaccccgtcgcgccaccttgacctgggccagctgcacctggcagcacgcatcaacgtctccgaatggcagaacaacaaacagtccaagcagtacatttcgtttatcaaaggcaagaacggcaagaaggtctcggaatacttccgcgactttatcggctgccaggaaggcgtcgacggcccgggcgaaacccgcaccctgctcaaggcgttcagtgacttcgttgaaagcgaagacttgccggatgaatcggcccgcgaaaaaaccaagacgctggtggactacgccagcagccaggccaagctcggcgagcccatgggcctggaagaactgtcgggtttgatcgatgaagatcggccaaaagccttctacgaccatatccgcaacaaggactacggcctgtcgccggaaatcccggccgataagcgcaccctcaaccagttccgccgcttcaccggccgcgccgagggcctgtcgatcagctttgaggcgcacctgctgggcgacaaaattgaatatgacgaagccgccggcaccttgatcatcaagggcctgccgacccaactgaccgaccagctcaagcgccgtaactgatgctcggcggggtcctcaagaaagtcctgctggtgttgctggtggtggtggttatccagaactggggcaagatcgagcgactgttcaacccttctcaagtgatttcagagcagctgcgcgcttcggcgcgcgtgacgctttactccaccgagtggtgtggctactgcaagcagatccggcattttctggaccagaaaggtattccgtaccaggcgttcgatatcgagaaggatgcccaggcgcgcaaggcgtatgaggcgctggggggcggtgggattccgtttgtggatgtgaacggcacgctgatccgggacttcaatcccgaggcgatcatggccgcactgaattaatgagagctggcttgtgtgggagctggcttgtcgggtcgccgcatcgctgcgatagcatcactgcggtgtggctgacagaccgaggtgtcggcatcgcaggcaagccagctcccacacttggcactcctaacgcaacactatcatccggccaagcacactgtgttgttcaaaaccgagcacagcctgcaaggcattcaacaccgcctgcgggtctttgctcggaaagctgccactgacacgcttggcgcccatctcgtcgttcagcacgaagattcggcccgggtagtaacgccccagatccttgaccacatccgccagcggcgccttgtagtaattgagccagccgtcacgccaggccaggcgtgattcgctgtcgaccggatgcatcgcatcggctacgccctcggcgtaggccacttgctggcctgccgtcagaatttgctgggggccgctgcgggacggcgtcacgccgacgcggccagagagcaccgtcacttgggcgccagccggttgcaggcgcacttcgaactgcgtccccagcacccgcgcctcaccactgcccgcttccaccacaaaaggctggccggtgtgagtcacgctgaaaaaacccgcgccgcgtcgcaggcggatgtgccgttcaccccggctgaaatccacggcgatggcgctgtcggcgtccagcgtgacttgggattggtcagccagggtgaccgtttttatctcccccggcgccgtgacgtaatcggcgcccaaatcatccacccagcgcgacggctgccaacctgcgcccatcgacaccatcagcaccaggcatgcgaccagggccagggcgccgctccagcgcacggcgggtgtgcgtttgggcgtgttcatcgcgttgagatagccctgcaaggccagcgcatcttcgcctgccagtttgcgtgccggtacttcactcagttcccacagcacctgggcctgggcataggcctcgacatgcgccggatcggcccgcagccaacggctgaacgtcgcttggtcgccactgcttggctgatcgtgcagcaggctcagccagtcgagcgcggcctgttcctgggcgggcgttggggtgacgttcacggtgctttccctggcgtgcgtgggggtgatggttcgcgaaggctggctttgcaggcttcgagggcacgcatcatatgtttttccacggcactttgggacagccccatggctttggcgatttgcgcgtatttgcgcccgtgaatacggttgagcagaaagatctgccgggtgcgctccggcaaactgcgcagggcggcttcgacatggcgcaaatcattgcccgcttcgagggcggcctgtggttccgagctttggttgtctggctgctccggcaaccagccctcgctgctgcgcacccgcgcgccttcgctgcgcaggtggtcgatggcgatgttgccggcgcaacgcagcaagtaggtgctgagttcttcaacctgcaccaagggccggcgccagaaacgcaggaacaggtcctgcaccaggtccgccgccgtggcccggcaacccacgcggcggctgaccagcgcttccatctgcgaacgctgggacaaaaacacttgcaggaaatgcgcgcgcccaccggccgcatcggtgtgcgggctgtcctgggattccggtggggtgctgatcatcataagaagctcaggatagggcgaacgccgcaacagggctggccagcaggccgacgcctgccaggatcaaggccaaccttggccgatatggcaacagcaacaccagcagcaacgcgctgagcatcaacacggcgcaccactccaccagcccctggccccagcccgtggcggcgacggccggccagatcgccaacgtgagcagcaaccaacccgccacgcgcaaacccaggcgccgacgcggcgaaggcttgctgtgaagcagctcgccgtgatggcggtctgtggacaggcacaacgcggtaaacccggcatagcacaacagcagcgcgaggagcattcagtgggcctcctgcttgagggccaagccatgcgcgcgggcggccttgatttgcggcgcagcgcggtggtgcatcttccaggctgcccacgtcaggaacaggccgctggcgaaacacgtcaggtcaaagccggccatggcccaatcgcccttggcgagtgacacgcccaggtgttgcgaggtggtcagcgcgttgagcaacgggatcgcaataaacagcaaggcgccgacacccaattgctcgacccaaccttggcgcccgcgacgcaagagcgcatgcaccaagctcagggcccaggcaataaagaagacctgcacctcccagtcggaacgctcggcgaagcttgccggcaacaggcggttggcccagaagaaggcggcaatggcgatcatcagcccggacatgctggcgatgttgagcacttccaccaaacgcagctcaaacggcatcaccccggttttggcatgcttgagctggcgcttgccaagccagatgaccagcccggtgccaatcatcgccgtgcccgcgaggccgcagatgaagtacagccagcgcagtaccggcccggcgaaatggcccatgtgcaggccgtagaaactgccgccgattgcggctggcaacgattgatccgcactgactcgcagcagctcgcccgtgtggccattgaaggaaacagcactgccaaaatcatgtactacgcggtcggagccggcgcgcacgacattgaccgaagcgttcacatcacctgggttgttcaccaccagacggcccacgtgcccaccgccccattgcccacgcgcttgctcgtacaacggcaataacggcagcaacgcacccggctgacccagcgccggtgcattgtttgtattggggaacacttcattgaaaaacgctcgactgtcgctgccataagccgcagtgatcggcgcaggcatcaccatgttcatgaagatcaccaggctgctgtaggtgatcatcaggtgaaacggcagcaccagcacgccgaccgcgttgtgcccgtcgagccaggaacgttggcctttgcgggggcggaaggtgaaaaagtccttgaagattttcttgtgggtgatgatgccggtaatcagcgcgacgaacatcaccatcgcggcaatcgtcgataaccagcggccccacggatagggcatttgcagttggaagtggaagcggtagaagaaatcgccgcccatgctttcgcgggcctgcaccggttgagcggtgacaggatcaagcaccttctgaatgaaattgccgcgtttgccggggtcgatcttgtcttgccacatcaccgacaggccggggtcgcggctgtccggcaaggtgataaaccagcgtgcggcgtgtggcgcctgttgctgcagataggcttgggcggcggcaagactgcgcgcgtcgtccagcggatgggcctgcacttcgggttgcatccagtgggtaatttcgtccttgaaatacgacagggtacccgtcaggaaaatcgcaaacagcagccagccgaaaatcaaaccggcccaggtgtgcaaccaggccatcgcctggcgaaagccctctttcatgtgcgcaccatccagaaacccacacctgccagcgtcgcaaacacggcgctcggcaccatcacgccaaaccaggcacgccacgccgtacggcaggcaaagcaccaaatgacggcgagcaggtagaacacaaacgaactcatcatcccggtgatcaccgcgtcggcgcgcgtggtgggcatccacagcgccaggcagacggcggccagggacgccatcagataaccaccgaccacagccgccagcacgcgggacgtgacagcgaggcggtaagcggccggaagtgaggttgtgcgtttcatgcaggaggcgccaggttcatcagcgcgcaatattaatgataaatattctcataagcaaaagagaacggatgaatcacctgccttggcggattgccgaacggtatcgggcgacctacaatgcgaacaattcttgttctctaaagcatgccgatgcttatggagtgttcgcgttgcagccgtcagacaccgtcgaagtcttgtatcaggaccatcaccactggctcaccggctggttgcgacgcaagctcggctgcccgcaaagcgccgccgacctggcccaggacaccttcatccgcgtgctcaccgcgcgcgaagcgccgacgctgatcgaaccacgcgcgttcctcaccaccgtggccaagcgtgtgctgttcaacttttatcgccgccaggacctggagcgcgcctacctcgatgcattggcgcagatgcccgaacacgtggcgccatcggaagaagaacgcgcgatcatcctgcagaccctggtggaactggatcaactgctcgacggcctccccgttcaggtcaaacgcgcgttcctgctggcccagctcgacggcctgacttacgcgcagatcggcgcggaactgggcatctccatcgccaccgtcaaacgccacctgaacaaagccgccatgcgctgctacttcgccttatgaatttctctacacaagtggccgaacaggccgtgcactggctgatggaaatgcagcaaggcgcgctcaacccgcgccaacaggcggcttggcagcaatggctggctgcccacagtgaacatcaacgcgcgtgggaccatatccagcgcgtcaaccaacggctgcgcggcatgccctcgccactcgcgcatgcggcgctgaacgcgccgaaatccggcagccggcgccaggccttgaaactgttgctgatcctcggcgccggctccgctgcaacctggggcctgcgccaacaacatattctgccgccgttgacggccgactaccgcagccccgtcggccagcgccgcaaagtccaactggccgacggcagcctgttgcagctgaacaccggcagcgctgtcgatgtgcattttgatggcgggcagcgtttgatccgcctgctggaaggcgaaatcctgctgaccgcccgcgcaggcagtgaaccattgaaggtgctgacgggccagggcttgctcagcagccagtcggcccgcttgaacgtgcgtcagttcaacgaccatacccaactggcagtgttcgacggccatgtggacgtaatgcccaaccgctacagcggcctgccgctgaccgtcgaggcttcgcgccaggtcaacttcacccgcaaaggctgggacaccccacgcccgaccgacgccaacagcggcgcctgggccgacggcatgctggtggccgcgcacatgcgcctggacgatttcctcaacgagctgggccgctaccgccgcggccagctcaattgcgacccgcaggtggccaacctgctgctgtccggcagttacccgctggacgacagcgaacgcattctcgacctgctggaagtgagtttgccggtcaaggtgcgacgtttcacacgctactgggtgaccgttcaggcacgtgtctgaaaatattttccaaaacagtgagccgttttccacccctcgcgtgacagagaaggaaagccaccttgacctttccttctcaggaccgcccttcatgccccagcaaccgacgcttctcgcccgcaccctgcgccaactcctgctcggcgccagcctcagcctgaccgtgctgccgtccgtcatggcggccgatgccaagccgtaccacatcgcaccgacttcgctggaaacagccctgaaccagtttggccgcgaagccggcgtgctgatttccttcggttccgaagtgacggcgggcatgcagagccgtgggctgtcaggcaactacagcgccgcagagggcctgcaaaaactgctggaaggcaccggtctgcaagcccgcgccgagggcgacaacgcctacagcctgcaaccgacaggcgccccggccaccctcgaactgcaaacctccaacgtggtcggcgactggctcggcgacgcggcgcaaaccaacgtgttcgagcaccccggcgcgcgtgacgtgatccgccgcgaagaattcgaacgccagggcgccactcaggcccgcgatgtgctcaaccgcattcccggcgtgaatgccccggaaaacaacggcaccggcagccacgacatggcgctgaacttcggcattcgcggcttgaacccacgcctggcctcgcgctctaccgtgttgatggacggcatcccggtgcctttcgcgccttacggccaaccacaactgtcattcgcgcccatcagcatgggcaacatggacgccgtggacgtggttcgcggcggcggcgccgtgcggtatggcccgcagaacgtcggcggcatcgtcaacttcgtgacccgcgcgatcccggatgcgccgaccgtcaaaggcggcctgcaaactgaaaccagcccgtcctccagccacgacggcttcaagaccaccggcaacctattggcgggtggcacggccgacaacggcctgggcggcgcgctcctgtattccggcacccgcggcggcgactggcgcgaaaacagcaacacacgcatcgacgacctgatcctcaagggcaaataccagctcgatgacgccaacagcttcaacgccatggcgcagtactacgaaggccaagccgatatgcccggcggcttgaacgtcaaggactacaaggccgacccgtatcagtctacccgcccctacgacaaattctggggccgccgtacgatgttcaacgccggttatcgctaccagcaagaccgccgcgaattcaccgccaacaccttcttcaccaccaccttgcgtaatggctacctcgaccagggcagcttcctttcgctgtcgccgcgcgaatactgggtacgtggcatggaaacccgtttcgcccagggcttcgacctcggcccgaccagccatgaagtgggcgtgggctaccgctacatcaacgaagccggccacgaattgcgctaccgtacgccgatcagcgccaaccaacagttgccagacaccaacagccgcaacgaccgcgacacccgtggcgccaccgaagccaacgcgttcttcgtcgatgaccgcatcgatatcggcaagtggaccatcaccccgggcgtgcgctacgagatgatcgaatcccagcagaccaacaacctgaccaacgtgaagtacaagggcgactacaacaccgcgctgccggcgctgaacgtgctctaccacctcaccgacgactggaacctctacgccaacaccgaaggttcgttcggcagcgtgcagtacagccaaatgcccaaccgcgtgaccagcggcgaagtgaaaccggaaaaggcgcgcacctgggaactcggcacgcgctatgacaacggcaccctgcgcgcggaaatcggcgcgttcctgatcaacttcgacaaccagtacgacagcaaccagaccaacgactcggtgatcgcccgtggcgaaacgcgccatcagggcatcgagtcgagcatcaactacgccctcgacggcttgagcccggcgctggccggttttgatgtatacgccacctacgcctacgtcgatgcaaccatccgcgaagacggcccgaacaaaggcaaccgcgtgcccttctcgtccaagcacaaaggcaccctgggcgtgggttacaccgaaggccgctggaagctcaacctcgacagcagctaccagagcagccagttcgccgacaacgccaacaccaaggccgaaagcgcagacggcagcaccgggcgcatcccgggctacatgctgttcagcagccgcgcggcctacgatttcggcccgcaattgtcggatctgaatgtggcggtcggcgtgaaaaacatcctcaacaagcagtactacacacgctcgtttgacgataacaacaagggcaaatacgtgggcgagccgcgcacggtgtatgtgcagacgtccatcgcgttctgattaccgggaccttacaaacgctgcaaaccctgtaggagctggcttgcctgcgatggcatcacctcggtgcatcagatgtaccgaggtgtctgcatcgcagcgatgcggcgacccgacaagccagctcccacaggggatcggctttgtcagttagaggggttaactgcccgcgaggcaactcggcgtgccggccaccagggcgtcgatggcacaacgcaccttggccggcatgtgcgctgccgtcggccagatcacgtggatcggtgcaggcctgtcgcggaagctgggcaataccgcttccagttggccgcgcagcacgtaatgcgcaatcaaccagctcggcaaccaggccaggccgacaccggcaatggcggcgtcggcaacggcctgcaggtcgtccagtaccaacggggataccacaccggggcgaaacgaggtgttgcaacggtaggcaatgcctcggtggccgatgagatcatcgatactttcgatccgtcccacacgctgcaaatacgccggtgaagccgccaggcccacggattgctcgcccaaccggcgtgcactcaggcggtcggaatccggcagcgggccgatacgcacagccacgtcgaaaccttcctgcgccaagtcgatcaaccggtcagagaacgaaatatcgatctccaactccgggtagcggtccatcaaaccccataacgcgggcgccgcataatgatgaccgaatgccagcggcaaactggcgcgcaaacgcccgcgtggcagttgccggccactctccagcaccgactcggcggcctcaagttccgccaacgcgcgcaggcaatgttcgtaataggcctgcccgtcttcagtcaggcgctggcgccgggtggaacgctgcaaaaggcaagtgcccagccgggcttccaaccgcgccaagcccttgcccaccgcagagcgtgtgaggttcaggcgctctgcggcctcggtcaggttgccgctttcaacgatttgcagaaagagttcaacaccgtcaaaacgtggagtggccatgtttgaattgtcgcctcttattcccctatcaaaagaaaacttatcacgaataaagaaccagattcccctgaaaataggccaatacctcaccgacaggagaatcccatgccacccgccgccacgttatcggccacccgccctgcgcgtaccgccagagatggcctcgccctcaccgccgtgtgcctcgttgcactgatgttcggcctggaaatatccagcgtgccggttatcctgccgacgctggaacagcaactgggcaccggtttccaggatgcccaatggatcatgaacgcctataccctggcctgcaccagtgtgctgatggcagcgggcacattggctgatcgctttggccgccgacgcatgctggtgttgtgcctgtggctgttcgggctcgcctcgctggcgtgtggattggccacggatgcctccacgctgatcgccgcgcgcttcgtgcagggcgtgggcgccggggcgatgatgatctgtcagttcgcgattctgtcgcaccagttccgcgagcccgccgcccgggcgcgggcctttgcagtatggggtgtgatcgcgggtgcaggcctgggtttcgggccgatggtgggggcgttgatcctggcagtggcggactggcgctgggtgttttgggtgcatgtgccactgaccttgctcacgctgttgctgctgcgcgtcagtgtgcaggagtcccgtgacccggcaggccatcgtctcgacatagccggcatgctcacgctgacgctgtcggtgttcgcgctggtgtacttcatcacccaaggcagtgagcacggtttcgccacaccggcaatgctgggctgggctggtctagcgctggccggtttgctgctgttcatcttcatcgagcggcgcagcccgcagccgatgtttgattttgcggtgtttcgcatccagcgtttcaacggcgcgttgatgggttcgatcggcatgaacttcagtttctggccgttcatgatctacgtgccgctgtatttccaggctgggcttggctacgacaccctgaccaccggcggtgccctgctcgcctataccctgccgaccttgctggtgccgccgttggccgaacgcctggccctgcgttatggcgccgagcgtatcatcccgctgggcctgggtttgatgggtgcgggttttatcgccatggcggcggccaataccgtgacgcaaccgagcatcgtctgggtactgatcagttgtgcgctggcgggaatcgggctggcgctgaccaactcgcccaccaccaacaccaccaccggctcggtatccgccgaccgcgcgggcatggcctcgggcatcgatctcagcgcgcggctgattacgctggcgctgaatatcgcgttgatgggcctggtgttgttactggggatcagccatcacctggcaagcctgctgccgggcaccaccgcactggattggccggcgatcagccaaaacattgcggcgggcaagctggacgtgccggggatgaccctccccgacgcccgggcggcactgcgccacggcgccggttgggccatgctgtttgcgggcctgggggctggcgtattgtcgatactgagccggtatttcttccggcgcggccgataaacgaaaacgggcctgcataagcaggcccgttccaatgggttgaaaaaactgtcagctatcagctgttaagcgcagcctgttcgttttccaaaaattcctcttcaagctcggcctcgtcagccttggtgttcggcaggctctggccggcggcgcgtggtttgccgcgcagtttgccgtacagatgctccagcgcatgttccagtttggtggccgcaccgtcgatcgcctgttccagagtatcggccttgtgcagtaccgagagcggttgatggccttttggccgtgcttccaggcggcaacttagatcatgggggcccggcttgtcgccgttctcatctttcaggtagacctcaacgcgggtcaggtcttcttcataacgttcgagcgtgctctcaatggtggtacgtacccactcctccagtcggatgctgctttcaatatggttatcgctattgacttggatttgcatagttcttcccttatttcagctagctcgccagaggtcacaaactgcaacaccggggtggtgaaaccatgacctcttgattacacaattgagcactcgctgaaacaattcaacccctttgcaaagataaatcacacattacaaattaagtctgactacgagcaaaaacgctgttagggtggggagttagttacatcttcttacgccccgcgaacctcataattgcccctctcccaacgggtgcaatccgcgaaagatccctgcttcctccaccagccagtcgtgcaccgcgcgtacacccgggtgactcaacgcgcccggcgcatacagcagcacgtagcgtttgtggttgggcacggccaagccgaacggcacgatcaaggtgccacgctccagctcatcattgagcaaggtgcgccgcgcgatggccacgcccatgccggcgatggcggcctcgatggtcaggtgattgcggttgaacgtgtggccgcgccgaacatccgcaccgtgatagccgatggcattcaggtaaaactcccactccgcatattcataactcccacgccaggcggtgatgtcgtgcagcagcgggaaatgcaccaggtcagccgggccgtgcagcggcgggcgcccacgcagcaggcttggcgcgcacaccgggaaaatttgctcatcgagcaacgccgtggataacaggccggggtagctgccgtcgttgaggtcaatggccaggtcgaagtcgccctcatgcaaggcgatgctgctgtcttcggccaccatgcgcagctggatatccggaaagcgttgctgcaaacgtggcaaacgcggggtcagccacttgcccagaaaagacgggatcgagcgcaagcgcaaggtgccactgatcatacccgcatccagccgctgcagctccgcgtcgatgctgccgtaagcctcacctaccgtcgccgccagccgctgcccctcggcactgagctccaccccgcgcgcacgccgatggaacaaacgaaagcccaaacgctcctccagttggcggatctgctggctcaccgcccccggcgtgatgtgcagttcttcggcgcaacgggtgaacgacaaatgccgcgcggcacaggaaaaaacgtgcaaccagacatacgtctggccatgaaggggccgggtcatagcgtttagtcctgctaaagggtgtcttaggataattcgttggtcagtgccgttccagaggctcagtatcgcgccaattccgctcgctctacaaaacatggcagcgatttctcctccattgcttgtaaggctttagcatggctatcagtgttttcgatctattcaaagtcggcatcggcccttccagctcccacaccgtcggtccgatgcgggcggcggcgacctttgctcaggcactgaaagaccagggtttgctggccgatacacgccgcgtcgaagtgcgtttatatggctcgctgtccgccaccggtgtcggccacgccaccgaccgcgcctgcgtgatgggcctgatgggcgaatggccggatcaggtcgaccccacctcgatcaacccacgcatccagcaactgcgcgagtccggcaaactgctgctcgcaggccgccaggaaattgccttcaactggcacagcgacctcctgctgctggacgaaagcctgccctaccaccccaacgccatgtcactgcacgcctacggcgaaaaaggcctgctcagcgagcaaacgtactactcggtcggcggcggtttcatcatcgaagcggcagaagctgaatcgggggttgcgccaaccagcgacgtgcaactgccctacgacttttccagcgccgtcgaactgctggccctgtgcaacaagcacggcctgcgggtttctgagctgatgatggccaacgaacgtgcgtggcgcagcgacgaagaaatccgcagcggcctgctgcatatctggtcggtcatgcgtgaatgcgtggagcaaggcctgcgcgatgaaggcatcttgccaggcggtctggatgtgccgcgccgagcggcgaaattgcaccgcagcctgttggaaatcggcaaaccgaatgtgatcacctcgaccctgtcggcgatggagtgggtcaacctgttcgcccttgccgtcaacgaagaaaacgccgccggcgggcgcatggtcaccgcgccgaccaatggcgcggcggggatcatcccggcggtgctgcactactacatgaaattcaacgccgacgcgtccgacgatgacgtcgtcaatttcttcctggctgccgccgccgtcggcatcctctgcaagaaaaacgcttcgatctccggcgccgaagtcggctgccagggtgaagtcggctcggcctgcgccatggccgcggccgggctggcggacatcctgggcgccaccccggaacaattggaaaacgcggctgaaatcggcctggaacacaacctgggcctgacgtgcgacccggtcggcggcctggtgcaagtgccctgcatcgagcgcaatgccatcgccgccgtcaaggcgatcaacgctacgcaaatggccctgcgcggtgacggcaaacactttatttccctcgaccgggtgatccgcaccatgcgcgataccggcgccgatatgcatgacaaatacaaagaaacttcacggggcggcctggcggtcagctgggtggagtgctgatcggagcacctctacccgccccaacgtgagcccgcgcaaaaataataacgaggcaataccgatgaccgatgtacgtacacctgctgccgctacaccttcagaagcaagccctgctgcaaacactaccgtgaccactggctggacccaacacgacaccacctggatgctcggcctctacggcaccgccatcggcgcgggcaccttgtttctgccgatcaacgctggcgtcggtggcttctggccgctgattgtgctggcgttgctggccttcccgatgacgttcttcgcccaccgtgggctgacgcgctttgtgctgtcaggcaaatccggcgacatcaccgaagtggtcgaagaacacttcggcgtcggcgcgggcaagctgatcaccctgctctacttcttcgcaattttcccgattctgctggtgtacagcgtggcgctgaccaacaccctcggcagcttcatggaacaccagctgcacacggcgccgccgccccgagcgatcctgtcgctggtgctgatcctcggcctgatggccattgtgcggtgcggccagggcgtaatcgtcaaggccatgagcgtgctggtgtacccgttcgtcgcagccctgctgttgctggccttcagcctgattcccaactggaacggcgcattctttgcctccgccggcgacggcatgcccctgccgctgttcttcaaaaccctgtggctggcgattccagtgatggtgttttccttcaaccattcgccgatcatctccgccttcgccgttgaccagaagcgcgtatacggcgcagcagccgagcgcaaaagcagcggcatcctcgccaccgcccacggcatgatggtgttgaccgtgatgttcttctgtttcagttgcgtgctggcactgtcgccagctgatttggcagccgccaaggcacagaacatctcgatcctgtcgtacctggccaaccacttccagaccccggtgattgcttatgccgcgccgttgattgcgctggtggcgattaccaaatcctttctcggccactacatcggcgccagtgaaggtttccaaggcttgatcgtcaaatccctgcgcgggcgtaaccgctcgatctcttccaaatggctggaacgctgcaccgcgctgttcatggtgctgacctgctgggccgtggcgaccttcaacccaagcattctgggcatgatcgaaaccctgggcgggccgatcatcgcgtgcctgctgtttctgatgccgatgtacgcgatccgccgcgtgccctctctgcgccagtattccggccaggtgtcgaatgtgtttgttgtggtgatcgggctgattgcgctgtctgcgatcgttttttctgtgttgccctgaaatagcccaccgaccttaagcacaacacaaaaaaatgtgggagcgggcttgcccgcgaatgcggtccttcagccaagtatttattggctgatacaccgcaatcgcgggcaagcccgctcccacattggctctcagtgcctgaaagctcgctgtacggcacggcccttgctgtaccgcttgcgagggaaacggaatttggccggtggtcagcagacgcgaactaatcccgataccggtcgtcaatgactgcaggttcttatcaggcggtaacgcaccatggacaatccttttcagatcatcaccgacacgttcacgcccacctaccgtgtcaatttaagtatccagcggctggacggcagcatcatgctgaccctctcggatgagtcaggcgtggtcgccaaacgcatgatcagcgccgaacaacgcaacgacccgcaacggctcaaacgcctggtgcaaagcattcaattcggcatcgccatcgagcagggccacagcgccatggaaattctggcggtgatgaccgacggcgacagccacaaactcttgcagccgccaccggcccgcgtactgcccttcaacgtcgggctttaaagctcgcccttctcggtctccaggctcgcctcgcccttgcggcgcgggccttcaaccttcaccgaggggaacgccgacgaggcataacgcaccaccagaatcgaaaacgccagcagcagaatcccgccgcacaggtagatgatgccgatgtcgggtgggttgtggtgcgacacattggagatcagcaggcgtgtcagcgcagtgatcgccacgtagatcaaaaagcgcaccggcatgtggttggtcttgaccgaggtctagcccaagcaccaaagaaatcttgataacccaagccgtattgtcggctcattgacattcgtctagttagacctatcatggctcaaggccaccaaaatatgcctgccactgaattgcatatgggcttttaactaatttgggttcagagagaaacggatgtcatttataaaaaaagatactaattatgggtacttgaatttttttgaaataacagaaagcggcctgtataaaatccagaaaaaaactcaaggcgaaataaaatcagaaagctttggactggacacttcgtcagtcctcaaaaatattaaagagtgggttagctcaagacgctttaaggaaacttcgccttgggccgaacatgatgaatccggtaacgcatcagtaatgtgttactgtcgagagattcatgagttcgaaaatggtgattttcttttaacattatggaagcatgaccctagtgactccaagagttatcggggacttcgactaaatgaaaatggagaacctatcggatacatcagtaacaactccatggatactggagacgacgtcgtctgggggcacccttgctactactggataatacccgattcaaatctagtaatctcagtaaaattcgaagattcgaaatgcgactctgacctaatgcaaaaatggatcaactactgcgttaggtaccgactaaaaatagaagagcataacaaacgccaacccggcgaatccgcgacaaccatatattttagttcgaaacactctccagaagattatagcctgctatatagattctcaaaaaagataaaagaattcaaaacaagcgaagcatatctaaagaaaatttgcgaaacaaccaagcacgtccttctcagaaacgaggtcatagttagttcacaagcggcccaacaaaactcacaaaaatcccccaaacaaatgctgacgctggacaaagcaaataatgaaatttttgactttattcagaatattatgggtagatttttcggaccagaactttctgacgaaaatagcgacgacggaaagagaagagttgaggtaaaactagaggccaccccgacgtacgaacaaatgcaagatttcatgaagtattcctccgatttcacggaggacggttgggcagatgtaatattcattgatgagaacgataacaaaacttcaataaaaaaacataggctagtcgagcgaatcatgcttcctaaaagcggagaaacctattccgcaatccagttatataaaaccatagcaggtaaccgctctaactatttagaagtaatatctcgcatcaatgagaagccattagcaatcgaagaagccgattcaaaagatatagcgatagcctaatggttattatactactttgcattataccatccatagcatcaatattctttggatggcatctcaaagctgaaacagtatcagccactctaggcctcctagtgggggtatcaggagctgtattcaccataatgagtatctggattgcctttctataccccaatgttctgagagttttaaaaggcgagaatctttttaacgctgatttcagttccagtggtggtgacactacaaggttgaaaatcattgtaggggtaatcattcaatctgctctatctatggctttcgcccttttaggaatgctatttgtgagcttctatgatgggttcgggttgaaaacgcaagaactcactctgaccgcgatgcagtttctgattgtatttttcagcggattacaaatatctgcaatactgagcgttattcatattaattctacccttataaaaaatctcgaaggtaaaaacaaagctcgagcacgcgactgggacacctaacctataagcaatccgcctgctataaacttacttgctcctcaatattacaaacataaaatatcttccgagttaaacctgcactaccaacaacgagccttatacaactaaacatcagatcacctaaaaacgtaaaaaagctagaagcggagaaatccacacaataaaaaattacaaacacacaatttcagactgtcttataaatgacaaattactaacactaaaaactgttgcgtttggataactagactccaacacgagctctctctgctgtcggttttttatgtacacattgtgcaccaacacgtcaacatctaattcttttaaaaccaaatctgtaatgattttatcatccagcctaatatccctacgcttttttatcgaggtatccctcctatacttcaacgcgtctccacaacgttccaaaattttaagcctagtgttattataaatagccaacccctgcatagaggttaaatcaagaactctagagctatctaattccaccacacttttaacaactgcaaattcctcatttaaatacttatttgaggcccactcaaccgcgtttgccttagcacaagaaaaaccatccataaaaaaatagacaccactacccaaccaatcctcttcacttgacacatagtgatagccatgagctaaaattgctgccgctcgagcgaatgaagtcccatgaaacccgataagacatacagaattagaaaaacacatgagcaatctcaagtcatcacaatatatagtttcaggcttactaaatcgatttattagatactatatctcaagaagtttttacggaaaactctccttaaaatttcttgcagcgagcctcgcaacggtttcggcctcgccaatcataggttttctgattgatctcgcaaccgaaaccctaaaaggcccaaccagaaatactaactgcactgtcacacccgacgacatactttcttttttagctttctttatattcacaggactcacaatatttttcgcagtaaaagcaaacaaccaaaaaaacaaaaacatagaagaacgaaaaataattttcgataaaaatacaggaggcgactttaaagttggagcgtcgaacataaaattttattgcggcagcgtaactcaaatttcaggcatcgatgccattgtaacatcagaagatactgacttaaaccttggttctctcaccggctcgtctacctcgggtagaatacgtaaaatggctgcaacatattccgacactgaagaattactggttgataatcttggaatttttatagcagagtggaaagccagcaaaaacaaatttagcaacttcaatctcggaacttgcgtcgaatgcaatcacacttataacgcaataaagaacgatataaaaaccataatcttttctgtagccattagaaaaaaacctgatcgtatagcatgcatcgatgaggtcgcaattgaaactatagtttcatccgccatcgagattttaataaagaattcacaaaacagcatctttatacccatattcgggttgggaagcggcggaaccccacaacatattgcaattccagctactgtcaacgcaatagtaagaaaactcaccaaattacagagaagtgtgaccgtatatattggcgtgtacacaatcgacgatctagcggaactatgcatgcagcttgcgaaaaaatagatcatgttctcaatcatcacagctatagaaaaactaaaatcaaaaaagcccaacctcgttatcggctatacatcgggagtatttgatttgactcaccaaggccacgcagattatctaaaagcctgcaagcaaagatgcgacgtattagtacttggcgtagattccgacacacttgtaaaaaatgcaaaaggtgtctatagacctatacaaaccgctaaagataggatccaagctattgccgaaaaagcagattattgctttgagaaggaacacccttctttccactacacaaaacaccttcagccggactattattttatttcaaaagaacgggagatcccttcagaaaaaatagcgaaaatatcttcaacaaagaactttaaagatataatatatatcgaacgcaaccaaaaattctcaacaactaaaacaatcaacctgctgaacgcggcagcccatcagcgtgcaaatcaagccacgaatccacaataaaaggttttaaattataaaattgacaccctacattattctattcaaaaaaccagataacttgcctgagccaaacatgggataaatctcaatttatagctacaatgtcacaatccgggatgccaaggcggatcaagcggataagaatatttatcatccaccaaacctcgttcccaaattagcttaccgccttcatcaacccccataacatgctccgttaatgaggtttcatagtagccacatgctaaatggcacaccttcattcgacgagcacctacaaccccccaagacttccaaaactcgtcggtctttatcgcaaaattaattgccccgttttgcctaacgctaggataggcaatcgcagatatatccctgtttttttcaaagatagatttagcaacgaatgatgataacgcgtacggaaaatcatcatcaaccaaacattcaagtaaaaacgcatccgttataagaagcgacttagcctcatctaaagaacagccatttaacatatcattgatggttgaagagaaatcgccacaaagaaaccctctgccggtacgctgcaccctattaaattcgccgataggtgcaatcctacacttagcattctctcgaatttgcaactcggaaagcaaaacaaaacttctctcaatatgtgtctcggcgaatgctgtctccgacctatcagcaacatataaaacaggataaccctcaggattagcacgaccaacggaggaaaccccatctggcctccaaagcaggtcctgcactaattcagggtattctccctctccaattattctcgcccgcctaaaaacagatcctttagtaaaatcaacattaaatataggatgagtcttagttaattcgtaaattatttcatgctgaagatctaaatttgccctcttaaattctttgatacgagaaatcaggtagtttatcggcaaaggcggatacgcttctgtaatggttctcatttatcggaatctctatccataacaacatctccagaagcacctatgttttttgtagacggatatttataagatgcaaaacgaaccaccaagatggaaaaagcaagtaataaaatcccaccacaaacatacaaaagaccagcatcagggtctttatgatgcgacacatcaccaattaacaatctagtcaaagcagtaatcgcgacataaagaagaaatctgattggcatgtgatttgttttaaaataaatacctaccatcgcccctagctctaggtaaatgaatagcaagagaatgtcatcaacactcacactgccttcgcctagcatcttgatgaacgtgacaacggcagcgtaggcggtgatagctccaatgccaaacaacgctagatagtggaaggcctcaacacataaattccccagcgaatcagccgagcaatgaaggtttttgcggagcttgtcagcccaatttaggttgtccattttctactgctccaatcggatacaacaccaagacgagaaacattaactacaaagtcaagctgcgagaagcccgttctggctaatttttgattttattccgagtgttagtatcgcgtggttggtcttgaagtaaatcccgaccatcgcgcccaattccaggtagatgaacagcagcaagatgtcattgatcttgatgtgcccgttctccagcatccccagaaattccatcaccgccgcccaagccgtcaccgcaccgatggcgaacaacgccaggtaatggaacgactcgacaaacaggttgcccagggattcggccagttcatgcacgttctggcgcagcttttcggcccaattgattttcacgatgatgcttccttaggtcggctcgaccggataatgcggggtggacgtgacggttgttctgcatgcagaaaaaaggccagaggccggtataagatggtggccgcgtgatatgaggcactgcaaacctgtatttacgggctacattaaaaaactgctacccaaaccccgtggtttggcttacccttttcactgtatatgaatacagtagtcgcaaaagacaactatcgtgaaggcatgtgaggtggtgaatggccgtcgaagtggtataccgcagcagccgagatctggagcgtttgttcatggataaagccgaagctgaccgtcatgacaagatgcttgaactcgctgagttgctggcagaagtgttgcaaaaagccgtgccgtccctgagcgagcagcaggtggaagaagccgggatttacatggcgaagaaccgcgatgtatttgccaaggcgttcaagagccagccggacgcgttgtccgagttgctgaacccggcggcggaataaagcccgaattgaacaggccctgagtcactgactcagggcctttttaatgcccgggttatttgtagagcaggcgttcggccaactcatccgccacccgcgcgggggagcgcttttcggcttgggcgtgggcgaagatttccgtgagccgcgtgccgatgttcgacaggtgcgcggtgatgccaggcagctcggccccgccatgcttgagggcgacgtagatcaggccaccggagttgatcacgtagtccggggcgtaaagaatgccgcgcccttccaactgatcggcgatgtccaggttggtcaattgcgcgctggccgaaccggccaccgccgcacaccgcagttggccgacgctgtgacggttgaataccgcgccaaggccgcagggcgccaggatgtcgcaaggggtgctgagcaaggcatcattggcgatggggtgcgcgcccagttgctccatggccagttgcaccttgccgtggtcgatatcgctgaccagcagctcggcccccgccgcatgcagttgctcggccaaggcgaagccgacgttgcccagcccctgcaccgccacgcgcaagccttcaaggttgtcgctgcccaagcgggccatggcggtggtgcggatgccggtgaacacgcccatggcggtatgtgaagacgggtcaccggcagcggtggtgctggtgacgaagcgcgtgtgttgggcaatgcagtccatgtccgctaccgaggtgccgctgtcgatggcggtgatgaaacggccgtcgagtttctcgatgcagcggccaaatgcttcaaacaacgccgcgcggctttccacgtgcaccgggcgaatgatcaccgccgtaccgccacccacgggaaggccggccagggcggctttgtagctcatgccttgggccaggcgtgcggcgtccgccacggcactttcatcgtcggggtaggaaaggtagcggcaaccacccaaggcagggcccaggcggctgttgtggatggctatgaccgccttcagcccggtgatcgggtcgatgctcaggtgcagcgattcaaggcgggtgctgtgcatgagagcaaacatcgtcaagctcccgaatcacttctggtagaggcccaagtataggcttgcggcagaaaactgccgaagcacgctggaataagccgcccggtttcgcaggccctgagacataagcacgcgggatatcgctcaaggtgctggacgaaatttcacagcaaggctaaaacgggggcatccgtcggagaatgcaatgaatccccgcaaagcctttttcgcctgcctggaacgctccccccctgcgctgtttgaagccgcgttgtggattgccgctgaacacgacacaagtgtgcagccactgcagatcctgcaaggcttggtcgtgctgcaacagcagatcagcgtgggcatgccgatgctcccggccgatgaactcggccaaccgctgctgcgtcgcctgaatgacctggggttcgcccaggacgacttcaccccgctgcgtcccgccgccgccctgctcgataaagtattgcagcgcaaacgcggacaaccactggtcatgggcctgattgcgctggagatggcgcgacgcctgaatatcccgatggtcggtgtgaatttccccggccatttcctgctgcgggtccccggcgccgatcacttgcttgacccctgcggcgggcggcgcctgtaccccaatgactgccgcgagctcctgcaccggcaatacgggccaaacctcaaattgcaggccgaccacctgctcaccgccgaaccccgcgcgatcttgcagcggctgtcacgcaacctgcgccaactgcacctttccaacgacgccccgctcgatgcgctggtcgatgccgaacgcgtgctggagctgggcaacgccagcgccgccgactacctggcgcgcgccagcctgtaccagcgcctggactgcccgagcgccgagcgcttcgacctggaacatgccttgctgctcagcgaagacccgatccagcgcctgcgcctgaccgagcggctggggcatctgccgcccaactccgttgtgcactgataagtgggagctgcgatgaatcagtgatgcgacggtgccttgagaatatcgccgtgcagtggattctgcggcgcctcgcgccccggtgaacgcacctgaataatcaacaacgccgccatcaccgccggaatcgcacagaaaaagaaaatctgttccaccggaatatgcatcgccaacagcatgctgccaaacagcggccccaggattgagccgaatcgccccacgcccaacgcccatccagtgccggtggcgcgcacgtgtgccgggtagaagttgctggcgaaggcattgagggtcagttggccaccgatgatgcagaacccggccgcaaacacgcacgccaccagataacgcgggttgtcgtggttcaggcccagcagaagggtgcataccgcagccgccgccagcacgccggacaacagccgcaccttgcttttcaggcggtcggcgaaccaagccatgccgatggcgcccagggtgccggcgaacaggaacattgaggtcacaaggttggcttccttcaaggccaaaccgctttccagcagcagtgacggcagccagctgatcatgaaatacagcaggatcaggctgacgaaaaaagtcgcccagagcagcagcgtcgggcgcgcatagccatgacgaaacagctccactaccgtcagtttgctgctctgttcctgccggttttcagcctcgctcgccagcggcggctgccagtcaggcagcatgcgcgccgtgactttgcgcaagcgcacatacggcggtgcatcacgcaacaaacggggcaaggattccggcagcagccacaccaggaacgggaacagcagcaacggcgtcacaccaccggccaggaacactgcctgccagccgtaaccctcgataaaccctgcggccacaaagccacctgccgcaccgccgaacgaaaagccgcacgccgccaacgtcaccatcagcgtgcgcattcgcggcggggaatattcggacatcagcgccatggcgctcggcatcgcgccgcccatgccgataccgcagataaaccgcgcggccatcaacgtggtcagcgagttggcgaacaccatcagcacggtgaggctggcgtagatcaacacgcaaccgagcaggatgcgccgcacgccaaaccggtcggccaatggcgttaccagcagcgagcccaatgtcagccccagcaggttggcgctgaacaccgggccgaacgcggctttttccaggccccaatccttggccaatgccggcaccacataacccagcacctgagcatcgtagccatcggttaccagcagcaacgccagcaacagaagaatcaaccactggtagcgcgacaccggccgggcgtcgagtgccgcgcgaaagctggcaatctgattgtgcatcgcaaggtacctttattatttttattcgggtgaatccgatcaactgtgggagctggcttgcctgcgatggcgcaatgtcagtcagtaaatgcttaactgacggaccgctatcgcaggcaagccagctcccacattgatttagggtgtttcaggggtgtctggttggttggccgggtgcgcctgaatgaacgccggatgctgcgccgccaacgccgccactcgcccgatacgcgggtaagccatcaacgacaccttgaagcgctccgccgcatacagctgagggatcaagaacgcgtcagccatcccgggcgcgtcaccgaagcagaaaccttcatcgccaatcaactgctcaacggcgcccaggccctggctgatccaatgcccgatccactccagcaactgcgcctcatcgtgcccccactgacgcagcaggttctgcgtgctggagttgtgcagcggatgaatgtcacagccaatgattgacgccaccgcgcgctcatgggcacgggtcgccaagtctttggagagcagcggcgcctgtggataacgttcgtccaggtactcaatgatcgcgggcgattgaatcaacagctcgccctcatcggtacgcagcgccggcacgcggccttgcgggttgatcgccaggtagcccggctggcggttggcgccgcccggcggcaccagcaggttgaccggtatcgcgttgaaatccagccccttgagtgccagggcgatacgcacccggtacgacgaggtggaacggtaataggtatagagttccatcgccctgccctctcagcgcgccgcgaccacggtgccacggcattcgccgaagccgatggacgcaaacccttcacggctgcaacgggcgcgcaggatgatttcgtcgccgtcttcaaggaacttgcgcacctcgccggaggccagctcgatcggctttttaccgccctcggtgatttccagcaggctgccgaactggcccggttgcgggcccgacaaggtgcccgaaccgaacaggtcaccggcctgcaactggcagccgttgacgctgtggtgcgcaaccatttgcgccactgtccagtacatgtgcccggtgttactcagggtcaggcgatgggctggcaggttttgctcgcgcatcgaggcggtggtcagcagcacttccagttcgatatcgaaggcgccggctttctggtcacggttgtcgagcaaatacggcagcggctgcgggtcgccttcggggcgtgccggttgcgctttgcggaacggctccagcgcttcggccgtgaccacccacggcgaaatgctggtgatgaagcttttcgacagaaacggccccagcggctggtattcccaggcctggatgtcgcgcgcggaccagtcgttaagcaggcagaaacccgcgatgtgttcggcggcgtcgccgatcgcaatggagtcgcccatggcattgccctggccgatccagatgcccagctccaactcgtaatccagccgcgcgcacgggccgaaggtcggttcggtctggccggctggcagcgtctggcctttagggcgacgcacctcggtgcccgacgggcgaatggtcgatgcgcggccgtgatagccgatcggcacgtacttgtagttcggcagcaaagggttatccgggcggaacagcttgccaacgttttgcgcgtgctcgatgccgacataaaagtcggtgtagtcactgattttcgccggcaagtgcatctggcaatcggcggcgcggtgcagcacctgcgcctcgcgggtgtgcagcttgctgccttcggcgagcagctccagcaggcgctcgcgcaaggccacgcgcgggccacggcccagttcgaaaaaagcgttcagctggccacccgcggtcgcttcgacggcacggcgagcctcgccttcgaactcatccagcgcagcgtgcaagtcgaggatcgcatcgccaatcgccacgccactgcgcggcgccgagccgttgatgctgaacacgcccagcggcaggttttgcagaggaaagtcagagtgaccgttggcggaggctacccagctgcgggtcggtgtgggctgagtcatgggttatctccggttcgggttgaaggtggcggggagcgaggcccagcacgcgtcgtaggaaggttgcagttgcgggcattcgagggcgaactgcgtggggcgcagcacctggctggtttcgaacataaaggccatggtgttatcgatcttgtgcggtgccaggtccgcgttgatggccttggtgcaggtctcgccatccgggccgtgggcgctcatgcagctgtgcaaggaggcgccgccgggcaggaaaccttcggccttggcgtcgtacgcgccgctgatcaagcccatgtattcgttcatcaggttgcggtggaaccacggcgggcggaaggtgttctcggccaccatccagcgcggcgggaagatcacgaagtcgaggttggccaggccgtgggtgctggtcggcgaggtcaatacggtgaagatcgacgggtccggatgatcgaaactcacggtgccgagggtgttgaaacggcgcaggtcgtatttgtacggcacgttattgccgtgccaggcgaccacgttcagcggcgagtggtcgagttcgcaggcccacagttcgccgaggaatttctgcaccagcgtcgtgggttgtttcaggtcttcgtagcgggcaaccggtgtgaggaaatcacgcgggttggccaggccgttgctgccgatagggcccaggtccggcaggcgcagtggcgcgccgtggttttcggcgacgtaaccgcgcgcctgggcatccagcagttccacgcggaacttcaggccacggggcagcacgacgatttccagcggctcgacgtccagcacgcccaattcggtggcgatacgcaggcggccctgctcgggaacgaccaacagttcgccgtcggcattgaagaacacgcgctccatcgagcggttcgcgcggtagtgatagacgctgatgcctgaaggtttttccgacccgcaattggcaaccatgccgacaaggccgtcgataaagtccgtcggctcgcttggaatttccagcgggttccagcgcagtcggttcggcgtgacagcgcccaacggcccaccggccagttgtcgctcaagttttacaaaagccgggtgattggccgacggctggatgcgatacagccaagtgcggcgggcttcgctgcgcgccatggtgaaggcggtgccggagaacagttcggtgtagagaccgtagggggctttttgcggggagttctggcccacgggcagcgcgccgggcagggcttcgctggcgaattcattgccgaagcccgacaggtattcgaggttcatggatcatcctctgtgcggaagttgtttttatcgtaatccagttacgcacaacgtaatttgatcactgtcgaccgtcaagctataaagacgcccattcatctctcggattctcgcccctccatggaaaagccccgcgacaccggtaaacagaaagtccgctcggccgaagtgggcaccgatatcctcaaggccctggctgaactgtcgcccgccacttcgttgtcgcgtctggccgaacatgtgcaaatgccggcgagcaaggttcatcgctatttgcaggcgctgatcgcttcgggttttgccgaacagaacactgccaccaaccattacggtttgggccgcgaggcgttgcgcgtgggtttggctgcgctgggcagcatggatgtgttgaaggtcggcgcactgccgctggctgagctgcgcgatgaattgaatgaaacctgcttcctggccgtgtggggcaaccaaggcgcaaccgtggtgcacattgagccggcggtgcgcgccattacggtcgtgacccaattgggttcggtgttgcccctgctcagttcgtccaccgggctggtgttcagcgcctacctgccgtcgcgcgaaaccgtggagttacgcgaacgcgaggttcaggcgggtatcgcccatgccttggcggacgaccaggcctacgccaccgcctgcgaacagatccgcagccgtggcttgcactttgtgcatggtttgctgatgcccggcgtcgatgcgttgtcggcaccggtgttcaacgcggtcgggcaggtggcggcggtgatgaccgtggtcggccccacttcactgtttcacgccgatgaagatggcccggcggcgcagcagttgctggcagcgacccgggccgtgagctggcgcatgggctatcagccctgaatcaatcgtcccagcgggacagtgcgactgccacgcggttttccacgcctttgacctgcgcacccgccactacgtagttgttggtgatcatcgagaacaccagccggcgcccatgggcgtcggtgatatagccgctcaacgacgacacgccgcccatggagccggtcttggcatgcaggttgttttcagcaggtgtgccgcgcaagcgatagcgcaagctgccgccggtcatgcggtcggtattgccggcaatcggcagcgcgttgtaccaggcgttgaaccacggctgtttgttcgccgccaacagcaggtcagtcagggtttgtgacgacaccagattcaggcgcgacaggcctgagccatcgacttgattcagcgccgccgtgtccagcccctgacgcttgagaaacccggcgaccgccaccgcacccgccgccgccgtgccgctgttggacgccttgcgccccatggctttgagcaaggcttcggacatgttgttgttcgacagtttgagcaacggcgtgatcagttcctgcaatggcgccgactgatgctcggccagcacggtgactgccactggggctgcactaccgattatccgccgcccggacacgctgatcccctgctgcgccaaggcctgttcgaacaggttggcgaccaactgcgtcggctcccacacactgaccaatatctggctctgcttgcccggtgcaaccgcgccactgagttgcaacaggttggtgccgtgacgacggttgacgccgtaagtgtttcccggcccgctgatggcgtggttgctcagttgcaggtaatcggtgggcgggaaaatatccacattcactggctggccgccgcgcaccggcgccttggccgtgaccagcacggtgccggcatcaaaatcggtattgggtgacacggtcaacgccgaaatctgcgcgccgtagtaggtgctttcatcgtcgtgggaccagtccacgcccaaccgctcggcgtcaaaccaggtgtcgtcgaataccagatcgccctgcacctggcgaatgccctggctggccagttgcgcggcgagtgcctggtagtcggcgaactggatggtcgggtcacccaggccacgcaggtagaggttgccggtaaggcggtcgccctgatggatgccgttactcagcaattgcgtggcaaagcggtattgcgggcccagcacatccatcgcggctgcagtggtcagcaatttgaggttggaggccggaaccaggcgcgtgcgcgggttgtgttgatagagcgttttgccgctttgcgcatcgcgcaccatcagcgaaaccgtggcgccgtgcaacgccgggtcggccagcaattggtccagagaggttgaggtcggtgaaacactcgcgcagcctcccagtaaaaaactcaagcccaccagcatcacgccggtgtgtatccatttgcccaactgcatcagaaccgttttcccgcaaagctttcagtggcggcaacgctaccagctctgcctccttgtggcgagcgggcttgccccgcgttggggcgcggagcggcccctctcaatgccaccgcatttttccatgcataccgcgccgccaggttttagggctgctgcgcagcccgacgcggggcaagcccgctcgccacaggaagcccgctcgccacaacagcaccgccgtcaggttagaacgtgagggtactggacaccgacacctgccgcgcatccccgatcgacacaaactgtgtgttcaccgaagaggtgtaatacgtgcgatcaaacaggttcttcacgttgagctgaaacttgaccttctgcccgtcaaccttggtgtcatagctggcgaacgcatcggccacggtgtagctcggcagctcgaagctgttggccgcgtcccctgcccgctcaccgacataacgcgcaccggcgccgacgcgcagttgatcgccacccaggatgctgccgaagtcatacaccgccgacagcgaaccggtgtttttcgccacgttctgcaggcggttgcccttcagcgtcgggtcttcggtgacctcggcgtcggtgtaggcgtagctgccgatcaggctccatttgtcagtcaactggccgctggcatccagctccaggccgcgtgaacgcaccttgcccgccacgctgtagacggccgccagaccgtcaccgacctgcaccagcacgttacgtttttcgatgttgaacaacgccgcgctcgcggtgatgcgccccggcatgtcgaacttggtgcccagctcccaagccttggattgctccggctcgaggctgccatccagcacacttttgttggccagtggcgcgatggtcgagttgggtttgaacgattcggtgtagctgccgtagaacgacaactcatcggtgtagcggtacaccaggcccgctcgcggcacccacttctggccattgccatcggtgttggccgtgaagggcacgcctttgccggcgtattggtcgtacatctggtagcgcgcgccgcccaccagaatccactgatcgttcaggtgaatcgcgtcctggaagaacagcgagtcgctgcgcagttggtccatctggttgctgtccggcgcgctgacgttggtgcccgccacttcgttgccgtacaccgggttgttgtagttgaagacaccccgcggcgcctggcgaatcaggtcggcgcggtagattttgcggtactcgtcgtccaggccgaacaccagatcatgctgcatgccggcggcattgaccttgccttcgaggctggccgtggcgaaacggtcggtggtcagcgcgccctgggtgccgtccatgctgcgggtcagggtgccgttggtattgaccttgaccacgcgcacctggctggcgtcataggtctcgcggttccagctgtagccgaagtgggctttccagtcgtcgctcaagtcgtgatcgacttccaggcggtacaggtcggagcgcccttccatgttgttgaacggctcatccagacggcgtgtcgcggggatgttaagcggatggttggtcttggggtcgatggcggtgccccggtcaaatggtgagagaaactcgcggtgctcataggcaaacaccaccttggtggtgtcgccgtaccaagccagggacggcgccaccagggtctcgcggtgggtgccgtagttgcgccagtaatcttcgtcctcatggtcgacgatcaggcgataggccaaaccgctgtcaccaatcggcccggtggtgtcaaggttgccgccgctgccgttcttgccgtcaccaaacgtcgaaccgcgcgcggtcagggaggtggactgcaccagttcaggctttttgctgacgatattgaccacgccgcccgggtcctgaatgccatacaacaacgacgacgggcccttgagcacttcgacgcgctcggcggtggagttcagcgcgcgcccctgcaccacgggcatgccgtcctgcatgatcgaaccgttacggttatcgccaaagccgcgcagcatcaccgcgtcctgggtgctgccgagggtgttggcctgggtaatgccgctgatattggccagggcgtcatccaggttgcgcggttgctggtcgcgcagcacttgggcgggcaccacgttgacggtttgcggggtttccagcagcaagccgtgggaacgcatcaccgagctggtgggcggcggctggtagctggtggtctcttgcgccgggctggcgccgctgatggtggtggcaccgaggttgaccgcgccgtcagtgggcaccggctccaacgccagggtgcgggcgtcgatctggcggaaggtgaagcccgtgttgccgagcaggcgttgcaaagcctgggtcgcactcatctgcccgctgaccgccggggcgctcaggccgtacggcgcttcatcggtgtagatcacgctgatcccggtgacccggctgaaatcagccagggcctggggcagcggcttggctgccagggcaaaattgaactgggcgctttgctgctcttgcgcctgcgcaatgcccagaggcagcaacgccagccccgacaccgccaataccgaggctcccagccactgtttaacccaaccgcccgccgtcgacttcatgctgtgagaacccgtgtagaaaacgctgttaatgcgaatagatcgcagtttcaagcactacacggttgggcggtggatttacctcacctctttttgaaaataatttatttattgcgcctgaatacggaaaccgaagcgtgggaaatgcacatgaaccgtgccgctgcgttcgccactacggcgcaggatcagttcttcgcgcccggcgaacagcaactcgccggcgatcggatcgacaccgtaatccgtcgcgttgacagtgacctgctgaccgaccttgaagccattcgggtcgacgaaaacctcatccggcagaggcgccggcgtagcattgcgcgcaatgttcagcgcctgttcggcactcatttcactggcggtgccatggccaaagcccaacacccggcccagccacgctgacgccgccgggtactcgtccaccagcggtgcggtcacaggcgagcctttgagaaaccacagcgggtgagccagggcaaagtcggcaatcgacggctcgccaaacaggaaatcgcccggctcgtgctgcagttgttgctctacgcgcagcatgagcgccggccactgatgccgcgccagctcaggcggaactttgctcgcggtgccgccgctgaacaacccgacgcggtcggccgccaatgcctgcaatatttccggtggcaatttcgcaaagcgaacggccagcgattccggctggaacaccaggctcacggcatggtgaaacaccacgctgtcggcccagaaggcaaacgcctgggtattcatttcctggccgaggggaaacagcgccggcgtggctttttcctgttccaggcgacgggcgatcagcgcggtgtcgcagtagatatccgcgccaatctgcaacaccggcgttttgcgatagccaccggtcagtgcggtgagatcaggtttcggcagcattggcgggatatgcaccgagtgccaggacagccctttgaaacccagcaaaagccgagctttttcagcgaaaggggattgcgggtaatggtggaggatcaactcagacatgccagactccgctcaagaagtgagccgctagcttagcctgcaaaaccgcaatcgggtgtagtcaagttgatgagccactcgccgccagacactccttggcactcttcttcaacttcttgatcagccgttcctgacgcagcgcctcgcccttgctcgcgcattgctcggtgtacaccagcgccactgcggggctggacaggaagaaccgtgcgcccttgccgctttggtgagaagcaaagcggcgcaccgggtcattgctgatgccgcaatacaacgcaccgttggcggcgcgcaccaggtagacgaaccagggtttggggtcaggcgtggtcacgggtgaattcggcagagcaaaggggcgtcaatcttatcaacgactggcctgaaatgccttcaagcctttgagcgcctgggcgcgcacggcgtttttcaacgcaggcgaccagcccagcaacaggcccttgatgcccaaggcctgccgggaccaacgccacaggtcgaagtggtcatggtgttcactgatcttgccgtcgcgaaatacaaaccgcgcaccgatatcgttgaccaccgtattgcccgtggcgctgaacaagtacgtcgccacccaatgggcgctgcctgtggtttcatcactgcgcacatggtcgaaggtcagggaaaaatctttggcacgggtggtgagcatgcgccacatatcaccagcgtcacgcccgcgcagctcaccgaaagccgggtcgctgaacaccacatcgtcggtgtagcaggcggccatggcctcggcgtccaggcgctggaaagcctcgtagaaacggttgatcagggcggtgtgggcatcactcatgggcaggctccgggcgctattgttatccggcttgcacgatagtctgccgatgcgcgcaacgccatgcccatttacggcataaatgaagggggtgaggttaggggtagaccacatccaggggggcgccgccgtggatggggatctttcgggaaatcagcaagaggtgcttatcgaaaatcgtggtgcccagcaggatatcggcttccatgacttgcctcgtcatgggtatgacagcaccgtccgccgagtctttaaaggagcgcagcgagctgggtcaccacacccgatatctcagcaaccaaaagttatgacctactataagttcaggctgtcttgcgataacttctctgacatcccctcacaccactcccagaccaactaacgttcaataaaacattcaaaaactctatttactcaataattaaggcaccattccagcatcccgcgcataagtaaacaagtccacgtcggttgatatacacaaccgatgcatcgccgtgctcttctgcttactgattgtcgaaatactgcgattgacccgcgccgcaatctggctgacggtcataccgctggccagcatgcgcaccacttcctgctccttgcccgacagttgcggtgcctgggtcggttgcgccacgcaggcttgatccagctgcgcgcgcaggcattcactgacaaactcacgcccctgaacgaccatcttcaatgccttgggcagctcccgggcggaggcgctcttggcaatcacccctcgcgccccatgactgaacgccgcccgcaaggtggcgatattggcgaacatggtcaccaggatcaccggcacttgcgggtactgacgattcaataaacccaagagtccataaccgtcagcctgatgatttccgggcatggcgaaatcggtcacgatcacatcgcacggtatgcggcccaccaactccagaagttgatccgggccatcagcctcgcccactaccttgcacttaccactcgcctcgatcaccactttctggcctacacgaacaatagggtgatcgtcagcaataatgatgcggatcatcgacttttccatgatggcaatttgagaccggcaaaataccgcgatcatgtttttgcaacaacaggtaataaatcgccatttcagtattagccccgcaattaaagggactcacacaaagacctacacaattaagagaaaatacatacagaaaagtactacacacaaaagtacacattccttcaaatgtgcgtaaggtaattcagataccactccacatcgcgacgaaactcatccatcgcggaccgattcttggcaacgcccgttgaatgcacgcatttgattaactccaccgcgctcgcctccaggccggtttgccccagaaatgccacgctgcccaccaaacggtgcaggcactgtgtggtcattcttgcatcgagtgaggcttgagcctggttcagcacagcaaggtcagcatgggcttctcggatcaggctaaagatcatcggctccacgatatcccaggaaccgaacacgtctatcaggctggcgcggcccggcagcgtgttactgcctttcgaggcgacgctgacacgcttgccggtaatggcagggtattgcggcaaccagtaacgcaatacctcgtgcaactgcgcaaacccgatgggcttgaccagccagccgtccatgccgcacgccacgcattcacgaatatcctccggtgccgggctggcactcaggcccagcaccgtgatcgatggataaccttcggtctgttcgcgccggcgcagttcgcgcgtcatggcgtagccgtccatcaccggcatgcggcaatcactgatcaccaaatcgaaaggttcggtggccaatgcctgcagcgcttgccgaccgtcgctgcaacagtggtgggccacgccgagtttttccagcagagagcccagcagcagtcggtaggtgtaatggtcgtccaccacaagcacccgggcttcacgcaacacaccgggcagatttcggtctggaaagtagcccggcatagtgccctctacgagagctatcagctcactcgttttttcgaaaaaatacgattgattggtctcaaatgaacgactcaatgcctcagcaagaaggcgaaaaatagccgaatgcgtgatttacagcgatacaacaactacgacaacacagcgtcactgcttccaaaactacgctttctgacgcaacaggccccctttgtcattgccaccctgtcattcgtaatagttgcatttccctcttgtgcccccctcgataaattccttcccgcttttccctgaagcggcgcgtgcccaacacaaccctaaaaccatgggcaacttcaccgcgccaatctgcccctgtagcccttgcataggaataacgttgtgatgaaagactctttcgccgccctggccggtgtcttgttgattgcccatggcgctgtggcgctcgccgccagctcggtagacctttcggtaaaaggtgcgattaccccgagcgcctgcactcccagcctgagcaacgacgggctggtggattacggcaagatctcggtacaagacctcaacccgagcggggtcaccgaactgccgagaaccttcttcaaactggcggtcaattgcgagggttcaagcttgttcgggctggcctccgaggacaatcgatcatcatcaacaggccccattgcctcctttgtgcttgggcgtatcagcccgacaaactggattggcacgtatttcctgaacatggaaaacatcatcaccgacgaccccgccgcttatccgatctactccagcgataacggctcgacctggatctacaaccccgacaagcatgtaccggccaacacgattaccgctttcggcaatcagtcatcaggtacacgggcaccggttcctctcaaagacgtatctctggacctggtagtccagcctttcatctttcctaaaaaccaaatcccggccggtgaaaccattcccctggacggttccgccaccttcgagttgcgctacctatgaatcccccagcgctacgtctttacggcatgttcagcttattgctaagcctgactccgatctccttcgccgccagcaccgtcgacttagcggtacgcggcagcatcacccccagcgcctgcagcccgttgctgggccaggatggcgtgatcgactacggcaagatcgccgcccgcgacctcaaccttacggccttcaccccgctgcccgcctccacattgccggtgggcgtcaattgtgaagcaccgatcctgttcgccttgaggctcaccgataaccgcgccggctccagtgccaccgcagagctcggctttggcttggggctggtcaacggcagcgaaaaagtcggcgtattccacaccaccttgcatacgccgttgggggacagtgcgcccatcactcagttgcagtcgctcaacaacggccagacctggagcgtggtcgaggaaaacgtaacgttgccaccactgcgcctggctgccttcggcgacgcctcctccggcgtctggagcccgacgccaatccaggaactgcgcgtacagatgcgtgtgagcacgttcatcgcccccgcccaggggctgaccctggaccgcgaagtgccactggatggatccgccacgctggacctgatctacctgtaatcactgaaacctcacaaggacttgtgcccatggataaacccacccttgccttgctgctcgcggcgcttgcgcccggcgcctttgccgccagcagcaccgacttgaatgtctccgggaccatcacccccagcgcctgcgcacccgtgctgtcgaatggcgacgtgatcgaccacggaaaaatggcctcccgggacctgcaaccaaccgcgcccaccctgctcaatccgcaggagatgcgccttgaagtgctgtgcgagggtgagaccttttttaccctgactaccatcgataaccgctcgggcacctccgccatcaaccccaggcatcacggcctgggcctgacccatgagaaagaaaaactgggcagcgtggcgttttcgttgttcgacccggtggccgatgacaagccggtcaaggtcatcacctcgagcaatggcggagccaactgggccgcgtcgatctacctggggcatgacgcgctgacctcatttgccgcactcgacggccccaacacgcccatcgccctgaaaaccctgaacgcacgcttgcgcgccttcaccatcgtcgtgcccgccaccgacttgaccctgctcgatgaagtgccgatcgacggccaggccacgctgcaactcaagtactggtaagccgcatttattacttaacccctagttaggagcaccaccatgaagaccctcaacgccctgttcgccaccctgctgttcactggcgccggcagcgctctcgccgcctccagcgtggacttgaccgtgcgcgggttgatcacgccgagcgcttgcgagccaagcctttccggcggcggcaacgtggagctcggcaagatttccgccaaggacctcaaggccgacgagagcacccaactggcagatcaagcactgcagctgactgtcacctgtgatgctgccaccctgatggcgatcgagccaaaggataaccgtgccggctcggcctccgaggtcgacgacgccgccttcggcctgggcctggtcaatggaaacgaaaaactgggctatttcgccatggtcgtggaatcggcggtggcggacggcgccgacctgggcccaatcgcctctcgcgacggcggcctgacctggacccgcctgatgttcctgatcaacaacggcattacctccgtcgccaacagcaccaccgtcgcacccgttccggtgcagtcgctggtggccgacttgacgatcatgcctcacatcgccccggccagcagcctgaccctgaccgaagaagtccccatcgacggctcggcaaccctgaccgtcaagtacctgtaatggaaaccgggcgcagcgcgttgctgcgcccaccgctgttctcacggatgtccctcaacacggttccaataccagaccatgaacacgctctcacgccgcttgatgacgctctgtctctgcctgacagccacccctgcactgtgcgcctccaaggtcgacataacgctgacgggcagcatcacccccagcgcctgtacgccggtcctgtcgcccagcggcatcgtcgaccatggacgggtgccggcccgctcgctcaatcagtacgagttcaccgaactgcccatgcgcacgctggacatgagcgtgacctgcaaccagcccgtgctgttcgtgttggtgggtgtggataaccgcgccgaatcctcggtggggccaggtttttactacggcctgggccacaacatatatgccccggccgagcgcctgggttcggtagccgtagccattcgcgaagcagtgggcgacgggcagcgcgcgatcgtgctggcctccagcaaccggggcctgacctggtttccggaaaccaacgcctacccggataactacatgggcttcgcacaccccggcaccctggtcccggacccgcacagcgtgctcaccgccaagctggaaatcaaaacgtcgatcaacgccgccgcctacctgaccctcgatcaagaggtgccgctggacggctccatcgtgctagacctgaggtatctgtagtcatgttccctttcccttgcgttgccaaaataattacacgggtgctcaacctggttcgctacgcctgtctctacctcgccgcgttgaccctgacgctgtggggcccgcccatggtcctcgccgacggcatggtgccggacacctcggtggtgatcgtccatgaggaggatggcgaagcctcggtgtcggtgaccaataccgactccaagctcgccttgctgcacgtcaccctcgaagacattcccgaagacacggcaccgctgctgtttgtcacgccaccgttgacgcgagtcgagccgtcgaaaagccagttgattcgtttcatcctgcaatcaccagcgccgctgaccacccagcgcttaaaacgggtgatcttcgaaggcatgcctcagggccgtgccgagggccaggccgggcatgcgcgggtcggcgtgacggtccgtcagaacttgccggtgatcctgcatcccaagggcctcgcaccgaatcgcacaccctggaccggtttggtctggcgcctgaaagaccagcaattgagcgtgaacaacccgacgccctacgtggtccgcctcgcccaggagttgaccttgttgcccggcaaaggctcagccttgctgccgcgcacctacgtgctgcccggcgagaccttgagcgtcgccgccagccaggcccaggccagcaccgtgcagctacaaccagccaccgtctacgggttcgcggtcgcgccttacgaagcaccgatcaccctttgatcgcagcgccggcgggacgtgtgccggcgccctgataacgaagtggcctcccattgaaggccaccgggagcgctcccgccgcgaaggaatggcgcgggtctgcctccactatttgagtacgacttgtgagcacagttatgactgatcgcgacggcgaagccgtgcctggcgtttcatcgctccgggcgcgcaggttgctggcgagcctggcgttggcgctgggcaccacgctgccagcgagcgaaaccctggccgacgaaagcgccggctcgttcgacccgcaaaccctggcccagcgcggcattgacccgcaattggcgaacctgttgctggaagccccgcgcttcacggccgggcgccatgccctcaacctcagcgtaaacggccagcgacgtggccgcgtcgatgtggtgttcaccgggcaaggcacgctgtgtttcaacagagcattgctggaggcgggaaacctgcgcgtgccggcggacgataccgagtgccatgattttctggacgcctacccccagaccgtcatcgagcaagaccccgccacgctgagcctgtcgctggtggtcccgaccgaggcgttgcgcccggccgtgcgcgacgtttccggctaccagaccggcgggtttgccgggctgctcaactatgacctgagcggcttgtacaacgaatacggcgacgacaacagccgcttcggctcggccaataccgaggtcggctttaacgcgggtgactggatcgtgagaagccgccaggtgcgtacctggcaagacaaagtgtcacgcaccacccatctggacgcctacgcacaacgcaccttcgccgaacaacaggcggtatttcaggccgggcaaatcagcctgtacaacccggtgctggccggcgcgcaaatcaccggcgcccaggtactcaccgaaaccgcgctgcaggatcagaaccagggcgcaaccatcaccgggatcgccaacagtccggctcaggtggagatccgccagaacggcactttgattcactccaccgtagtcccggccgggccattttccctcaccgatgtgcggcgcctgaacagccgctccgacgtggaagtcacggtcaaggaaaccagcggcgaagagcgtcgcttcaccgtaccggccgccatgctcggcttgggcttgccggcgccgggctactcggtggcggccgggcgcgtgcgcaaggtcggtgccggtgaaggcgccgagccttgggtggtcagcggcggctggagcggcgcgctgcacccgcaagtcagcgtgggcgctggcgtgttgggcgccgaagactatcgtgcagccggcgcaagcctgggctggttgccgtggcaagacagccagttccaggtgtcatcccaaatcgcccaagccacacgagacggcaacgagcgcggggtgcaaaccgacctgtcgtggtcgcaacgcttgagcgaacgctgggcggtgaccactgccggctcctggcgcaccttgggttatcgcgatctggaagactccacttacatcaccgaaacccgtgagcaacgccagtcccgctaccgcgaccagcaaagcgcaacagcgtcctggtcgcacccgatgctcggcgcattcagtgcgggtatctcgcgttcgtcctcgtttaccggcgacagcagcagccgcgcgctggcgtcgtggggcaccagcttcgggcgcgtgtcggtgtccgccagtgccgagtggcaagtcggcgggcgccagcgcagtgacgacagcgtttacctgaacatcagcgtgcccttgggcgaaacccgccgaggccgcgcctgggcgcgcaacgcaggcggtgatcaccgcgtgggtgccgggatcagtgagcaaatcaatgaccagctgagttaccaagtgggcgtggagcgcgatagccgcgaccgcgaggtggagacgtccgtcggcgtctcgacgctgccgtactacagccagctggacttcaactacacccgcaacaatcaggagcgttccagctatcagggcggcgcgcgcggcggggtggtgctgcacggcgatggcctgaccttttcgccctacccggtgcgcgagaccttcgccttgatgtcagtgggcgacatggccggcatcaaggtcagcacgcccagcggcccggtgtggaccgactggcagggccaggccgtggtgccgcagctcagcccctatggccgtagcccggtggaagtgcaaacccgctcgttaccgcgcaacgccgatatcagcaacggcctcgccgtgctgtcggccgggcggggcgcggtggacaaagtcgagttcggcgtggccctcacgcgtcgcgcgctgctgaacgtgaccggcgccaacggccaaccgctgccacgtggcgcggccgtcagcactgccgacggcgagttcgtgaccctggtgcaggaaggcagccaagtgttcttgccggacgtactcgaccgtcgcgaactgtgggtcagcgcccccgggcaaccccgttgccgcctggacttcgacctgcccgagcgtggcgatcccgaggtgtatttcgaaaccgcaccggcgcggtgccaaccatgaggaacttaaccatgggcctgaaacctgcgttgttgtcagccagcctgctgctgagcactaacgcctggggcatggatgactgccagttgaacctgagcgaaaccacggtggatttcggcctgatgaaccgggccgtcacgcaagcgatggcggtggaaaacccgttgggcgaacagcgtttgagcctgacgttgaactgccctgagcccacagacctgagcgtgttctatcgcggtttagcttccggcagtgagcgctttcaatttactcagcgtggcagctacagcttgcgggccagcgatgcgctgctggacggccaggccgtggaactgggcttgttacccggcagcggccaaccggcggtgagcagtggagccgccctgcgttggcgcccggagcatggcatcgtgcctctgcgtgccggggtgcctgccatcgggcgcagtttgtcattgcaactggaagtcggcgcctgggccgggcaagacgcctctcgcgtcagtgatgccgtcacctgggacgccagcggcgtgttcgacgcaatcaacacggggcgctcgcgggaattgcgcctgcaagcccgcttcgctccggcagcctgtacgccgagcctgtccaacggcggtacggtggcattcggcaaattgtcggtcatggacctgaacgccgatgaggaaaccaccctgcccgcacgaccgctggtggtcaacgtagcctgcgacgcgcccgcggttttcgcgctgcgcctgcaggacaaccgccaaggctcagccaccggccccggcgatgaatccacctatggcctggggctcgacgcccgccaacagaaaatcgggcgctaccggctgatcttcgacccgatgcgcgccactgccgacagtggccttcagctgtaccgcaccgactcgcccaccggcacgttgccgtggagcagcgcgagcgccaacccgctggcaattggcgccagccgttatctcggtttcagcacccacaccggcagcaccagcggccccgtgccgattcaacaactcagcgccaccaccagcctggaagcagtgatcgcaccgctgggcacgctggacctgggcagtgaagtgcgcctcgacggcgccgccaccctcgaactcaactacctctaggagctttcccatgaaacaccttctgattgccttggcgttgttgtcaggcactgcgcacgccgcctccactgtcgacctggctgtcaccggcctgatcacgcccatggcctgcacgccgctgctgtccagcggcgggttggtggacttcggcaagatctcgcgcaatgacctcaacctcaccaatggcacacgcctgccgcacaagtacctgacgctgaccgtcaactgcaacgcgcccggccgctttgccctgcgcatgcgtgacaaccgtgacggcacggcccacgtcaacagcgagattttctacggcctggggctggacaccagcggcaacaagatcggcgtgtactcggtgagcttcgaccccaggcagaccgtggtcgatgacttggccgtggtgtacggcaccgaatccaccaccggcggcctggcctggcgcaccgccaacctcaaccccatcgatgtgggctcgcgcagcctgctcggttttaccgatgtagccggcagcaccgccggcccctcggccatccagacgctgaccagcaccctgaagctggaagccacgatcaacgcccggcagaacctggacctcagcgtggaaacgccgatggatgggtccgccacgttggaagttgtgtacctgtaaaccctgaaatgttccaccttccctagttaggagcaacaccgatgagcaccacgcgtaacctcctgatcgccgcattgttggcgagcagcaacgctatggccgcatccagcatcgacctgaccgtcaaaggctcgattacaccgagcgcttgcacgcccagcatccccaacgatggcgtagttgactacggcaaactttccgccaaagaactcaatgtcgacaaagtgacgcgactggagcctgtttacttgggacttagggtcgtctgtgatgcctccaccctttacgcactgcaaggcagcgataaccgggctggctcggaacctactggccacgaaggaaacttcggtctaggcctcataaatagcgacgaaaaactcggctcctttttcgtgagtttcgacaaagcgatggccgatgatgtgccggcaagattcattaactcctatgacggcggagcaacctggaatccatggccaggtggcggactgtgggtgggcggcactgtagccgtggccaacaacaccgttattgcgccgattccggtaaaggtgatgaccaccgagatggatatccggacgctgatcgcccccaccaacacactgaccctgaccgaggaagtgcccatcgacggctcggtcacggtgacggtcatttacctctaacacgcactccacgtcccctaagccaggaacaacatcatgggaatcacccacaaccttttgacaacagccttgatactaggaggcgcaggcaatgccctcgcggcttccagcgtggacctcgccatcaagggttccattactcccagcgcctgcgaactgagcctcgccaatggcggggcctttgacttgggcaaaatatccgccaaagatttgtggcccgaacagccgacagacctgaccgaacaaaccacgcaactgaccgtcacctgcgaagccgccacactgatggcgatcgaatccaaggacaaccgtgccggctcatcctcttacgacgatggcactacatttgggcttgggctgatcaacggcacccagaaattgggctacgtctacacatcactcagagggcatgtggccgacggtacgatggcctatggtatccattcgatggacggcggtttgacctggaccaataacggctcattcaaacctggcagcctctcatcgatctacagggccgcccccatagttcccattccggtccaagtgcttacagcaaatctgactctttatccggctatcactgcagccaatgacctgacactgaccgaagaagtgcccatcgacggctcggtcaccctgaccgtgcgctacctctaaaccttctcgctggtcaccccgacgtacagggcacgaccagcccctaacccggcgatgatcgcgcccaggccgatcacaccgaacacccagccggtggcgccccagccaccggtccagtcatgcagcacacccaccgccaacgggcccaatgaggccagcgtataaccgatgccttgggccatgcccgagaggttggccgccacgtgggagtcacgtgagcgcagcacaattaatgtcagcgccaggctgaaggtaccgccctgccccaggcctagcagaatcgcccaaccccacaagccttcaagcggtgcatacaggcaaccaaacagtccggcgagggtcaagaccatcaccaccacaatggccaggcgctggtccttgccacgggtggccagccacggcgccgtgagcgcactgagcagttgcacaatgatcgaacccgacagcgcaagccctgcctcggtagcactcaggccgcgcccgatcaggatcgacggcacccagccaaacacgatataggccagggatgattgcaggcccatgtacaaggtgacctgccaggcgagcgggtcgcgcaacaaacctttcacacggtaggccacttgatgagcgccgtgcttctgcccgacttgaggcaaccagaacaatgccgccgccagtgcaggcaaaatccagaagcccaggccaatgttccagctgttatcaaaatactgactcagtggcaccgtggccccggccgccagcgccgcgcccaggcacagcgccatggtgtagacgccggtcatggtcccggcctgtttggcgaagtcacgcttgacgatgcccggcaacaacacgccgatgatgccgatactggcccccgcaatcaggctgccggcaaacagcccggcctcgccaaacgaactgcgcagaatgatgccgccggccaatgtcagcaaaatccccaacaccacacgctccgcgccaaaacgccgggccagcgtcggcgccagtggcgcgaacaggcccaggcacaacaccggcaaggtggtcagcaagccggccttggcggccgataatcccaagctgttggacacctcgctgagcagcggcgacatgctcgacagcgccgggcgcaggttcagcgcgaccagaatcaaaccgagcaataacagccacgggcggctgaccacagggtgactgtgttgcacagtgtcgtcgtcggcttcggcgtcgatcaacagttcttcgagtttggtttcagggttcattgatcaactgccggcagagggatttggcgcgttccgggtcttggttttcgaccgcttcgagcaaggcgatatgcaggtcgaataccgcctggcggcgcggagtgatgttcaaggtctggcgcaactgggcgccgacgatggcggaaaagtactggtacaactcgctcagcgccgggttgtgcgccgcgtccaccaggcgtttgtggaagaccagatcggcgctgatataggcctcgaggtcgccgtgatacagctcgccgctggcctcaagcgcttcgcgcaagccgttgaggtcttcttcagttcggcgcaatgccgcgaggctgattgcctccacttccagaatctgccgcgtctcttgagcttgttccagggtgcagtgggatagcgcacgcatcgtgcccaacgggtcagtcatcgaacgcaaataactgccatcaccctggcggatttcaatcaacccggaaaacgccagcacgcgcatggcctcgcgcacggtattgcggctgatgcccagctcggcggacagctccggctcggtgggcaggcgttcgccgatggcccatacgccctggctgatgcgcaggcgcagttgctcaagggcctggtcgaccagagagcgtttgatcaagggggcgatgtctgtcatgaggtttacgctttcgtccaatcataggatgaattttcctacagcctattcggagttgcctacaaaggcaacgcactagggtcttcaggcagggaaatgaactgaattttcgattagtaaaattaccctctgagggtaattattagacttaggtgtcttatggaaaagtacacacctcattacgacttagccttggtcaaggctgaagtcatcagatcaggtagaaaggcgtttacagcaagtgcttgggaaggcgctcgacgactcaagttgtgcaccagccaaatgcaacaggtggtctacgcccttgagcatcggatgttgtacaaatcaatgacgacctatgcagaccatcgggtatggcaagacgtttacctaatcaaaatttacggcacggagatttacatcaaggtcacttaccgccctggcggtggtcctcccgtaatctccttcaaggagaaaaccttatgagaacccagcaatgcatgagctgcggtagccatgacgctatgcagcatttcgaaggtcgcaccttcacgatcaacacccggggaatgattcgggatattccggacattgcaggttgggaatgcgagatctgtcatgaagttgaattcgatcacgacgacgacagcgctgatcgttatggagaagcttccgatctgctactgatcgacgcgcgccaaatcatcgccgccgaaatgaagcgaatccgccgcaaactgcacctcacacaaaaagaagcagtgaggctcttcaccgtccgcgggcacaatgcattctctcgctacgaacgggcggagatttttccgccggaaccgttgcttacattgatgcgcctgctggataaacatccgcacctgctggcagaggtagaggcccttgctgtcggtgatgacctgaaccgcctgctcatcgcgaaagacgcgcaacagctcgcggcccaagcctcctgaaaacaacaggcaaaaataaacccggcacagggccgggtttattcattcatccatcgatcaatgcaaaatctggctcaagaacaacttggtccggtcattctgcgggttgtcgaagaagtcattcggcgcggcctgctcaacgatttcgcccttatccatgaagatcacgcggttggccacggtgcgggcgaagcccatttcgtgggtcacacacaacatggtcatcccgtcttcggccagaccgatcatggtgtcgagtacttccttcaccatttccgggtcgagtgccgaggtcggctcgtcgaacagcatgattttcggcttcatgcacagcgcacgggcaatcgccacacgctgttgctggccgccggacaattgccccggaaacttgtgggcctgctccggaatgcgcacgcgttccaggtagtgcatggcaatttcttcggccttgcgcttgggcatcttgcgcacccacatcggcgccagcgtgcagttctgcaggatggtcaggtgcgggaacaggttgaagtgctggaacaccataccgacttcacggcggatcgcttcgatctgcttgaggtcgttggtcagttccacaccatcaaccacgatgcggccctgctggtgttcttccagccggttgaggcagcggatggtggtggacttgcccgagcccgacgggccgcacagcacgatacgctcgccctgcttgacgttgaggttgatgtctttcaacacgtggaactggccgtaccacttgttgacgccctgcatctggataatgccttcagggctcacaggctgtttgattgcttcgctcataacaacaactcctaacgcttgtggcctgtgtcgagcttgcgttccaaatgaatggaatagcgcgacataccaaaacagaaaatccagaacaccagggcggcgaacacgtagccttcggtggccatgcccagccatttagggtcggcggcggcttgcttgacgctgttgagcaggtcgaacaggccgatgatgatcacgaggctcgtgtctttgaacagcgcaataaaggtgttcacgatgccgggaatcaccagtttcagggcttgcggcagaatcaccaggcccatgctgcgccagtaacccaggcccatcgctgcagccgcttcgtactgacctttgggaatcgcctgcaagccgccgcgcaccacttcagccacgtaggccgactggaacaggatcacgccaatcaaggcccgcaggagcttgtcgaaattcatgccttcaggcaggaacagcggcagcatcaccgaggacatgaacagcaccgtgatcaacggcacgccgcgccagaactcgatgaaggtcacgcagatcacgcgaattgccggcatgttcgaacgccgccccagcgccaacacaatccccagcggcaaagccccggcgatgccgacggtggcaatcaccagggtcagcatcaggccgccccatttgtcggccggcacgttggtcaagccaaagataccgccgtgcaagaggaagaatgcgacgaccggatacaccaccaggaagcacaggccgtagatcgccttgcgtttgaaacgcgagatgaacaacggcgccacacccacgatggccagccacacggtcaggtccacgcgccagcgcaggtcgacggggtagtaaccgtacatgaactgcccgaagcgctgctggatgaacacccagcaagcgccttccttggtgcaatcggcacgcgtggtgccgacccagttggcgtccagaatcgcccaatgcaaaatcggcggcaccaccagatagaccaagtagatcgccaggaatgtcagcagggtgttgagccaactggaaaacaggtttgcgcgcatccaggccatcggtccgaagaccttgttcggcggcggcatatcaggtttgaaagtatgagaactcatgtgtgtttcctcaccgctcgatcagcgcaatgcgcttgttgtaccagttcatcagcagggaaatactgatgctgatcgacaagtacacgctcatggtgatggctatgacttcgatggactgaccggtctggttgagcaccgtaccggcaaacagcgaaaccatttccgggtaaccgataccggcggccagcgacgagtttttcgcaaggttcaggtattgactggtcagcggcggaatgatcacccgcagggcttgcgggatgatgaccttgcgcagcgtcggcccagggcgcaggcccagggagcgcgcggcctcggtctggccgtgactcacagactgaatacccgaacgcacgatctcggagataaaggctgccgtgtagacggtaagcgccagggtcagcgccaacaattcagggatcaatacccagccgccgacgaagttaaagccctgcagcttgggcatttcccagtgcagtggcgcgccgaagaccaaggcgcacaacgtcgggatcacgatgaacagcgcaaggcccgcccagaacttgtggaacggcacaccggtggcttcaaagcgcttgttagcccaacgcgccatcagcacgattgccacgatggccaccacgatactgaccacaaacggccagaaaccctcagctgcctgcgcagccggcatattcaggccccgggcgctcatgaagaatgtatcgttaaagttatggctgttgcgcggccccggcatggtcaggaacaccgcgaagtaccagaacaggatttgcagcagcggcggaatgttgcgaaacacttccacatacacggtcgccagtttgttgatcatccagttcggcgacagacgcgccacgccgatgatgaaaccgagcagggtcgccaggaccacgccgatcacggtcaccagcaaggtgttgagcagaccgatcacgaagacgcgggcatagctgtccgattcggtgtagtcgatcaaatgctgcgcgatgccgaacccggcactgcgctcaagaaagtcgaaacccgaggtaatgccccggtgttgcatgttggtctgggtattgttgaagaggtaccagcccagcgagaccaccgccacaatcgtgatgatctggaagagccacgcacgcactttagggtcgctgaagctgagcttctgctttggtgcgccgatttgattttgcatgaagtgccccggaaagaatggaacagaacatcacccggcggttggcccaccgggtgacagaaccatcagcgatcagcgcacagggggtgcgtattgaatgccgccgttgttccacagcgcgttcaggccacggtcgatttccagcggagtgctcttgcccaggttgcgctcgaacatttcaccgtagttaccgacttgcttgacgatctgtacaacccagtctttcttcactttcaggtctttgccgtattcgccgtcagcaccgagcagacgggcaacgtccgggttcttggtggacttggcttcagcttcaacgtttttggaggtaatgccggcctcttcagcgttaagcatggcatagccaacccagcgcacgatggccagccactcgtcgtcgccgttacgcacgaccgggcccaaaggttctttggagatggtttccggcagaaccacgtagtccttcggcgaagccagcttgctgcgctgggcgaacagttgggacttgtcggaggtcagcacgtcgcaacggccggattccagcgacttggcgctttcgtcggaggtgtcgaaggtgatcggggtgtacttgaggttgttggcgcggaagtagtcggaaacgttcagctcggtagtggtaccggcctggatgcagatggttgcaccgtccagttccttggcacttttaacacccagcttgttgttcaccaggaagccgatgccgtcgtagtaggtgatgaaacccgggaatttcaggcccatgccggcatcgcgggagctggtcatggtggtgttacgcgacagaatgtcgacttcgccggactgaagcgcggtgaaacgctccttggcattcaactggctgaatttgaccttggtagcgtcgccgaaaacggcagcggctacagcgcggcatacgtcagcgtcgatccccaggatcttgccgctggcatcgggtaccgagaagcccggcagaccgtcactcacgccacattgtacgaagcctttcttctgcacggcgtccagagtggcgccagcttgggcgaaaccgctgacacccagtacagccgccgcacacacgatggccagggtggatttcaataccttcattcaaacctccagttttgctcttgttgtgtcggagctcgaacctcagcgcacccttatgaggcgatatcgacctgtgttggctttttttaggtcaagcggcatgaagttgtcgcagtaattccagttgctatcccacaagcggcagtcactgatagtgttaccgtcccgagatagttctgacatcgacctacacatagcaagccccgtaccagagtgctggctgagtcgtttcagcccatggtcaatagaaaaagattcaacgttgcgacattctcttaacagatcaacgcattgcgcaccgttccgatgcacccaatcggagcgcacgcacatatatggagcagacatgaccgaacccttgattcttcagcccgccaagcccgcagacgcctgcgttatctggttgcatggcctgggtgccgatcgctacgactttttgccggtggccgaggcgctgcaggaaactttactcaccacccgcttcgttttgccccaggcgccaacccgcccggtgacaatcaacggcggctacgaaatgcccagctggtacgacatcaaggccatgagcccggcccgttccatcagcctggaagagctggaaacctcggcgaaaaccgtcacggatttgatggaagaccagaagagaaccggaatagacgcctcgcgcattttcctggccggcttttcccaaggcggcgccgtggtgttccacaccgcgttccttgaatggcagggccccttgggtggcgtgatcgccctctccacctacgccccgacctttggtgacgagctgcaattgtccgccagccagcagcgcattcccgcgctgtgcctgcacggccagtacgatgacgtggtacagaacgccatgggccgcagcgcctacgagcatttgaagacccgtggtgtcaccgtgacatggcaggagtacccaatgggccacgaagtgttacccgaggagatacgcgatatcggtgcctggttgaccgctcgcctgggctgaaaaccacacattatgtagccacatgacagacgcactacgccgcgcccgattcttgcattacactggccggcgtacattccttaaccaattaatgagatcaccgtgctcaaagcacttaagaagatgttcggcaaaagcgaggctgagccgctcgcgcctgttcccagtgctcctgtccctactgccagcagccgcaatgacggcaaacagcctgaccggaccgcacctgtcgcttccgagaaaaaggcgccggtgacaccgcctgaacaggtcactcctgccgaggctgcgccaacgccagtacctgcgccgaaagcagctcgccgtgagcgcgcgccaaaaccgcccgttattgcgtggaaactcgaagacttcgtcgtcgagccccaggaaggcaaaacccgcttccacgatttcaaactggccccggagctgatgcacgccatccaggacctgggctttccgtactgcacgccgatccaggcgcaggtgctgggcttcaccctcgccggcaaagacgccatcggccgcgcccagaccggtaccggcaagaccgccgcgttcctgatctcgatcatcacccagctgctgcaaacgccgccgccgaaagagcgctacatgggtgagccgcgcgcactgatcatcgccccgacccgcgagctggtggtgcagatcgccaaagacgccgccgacctgaccaagtacaccggcctcaacgtcatgacgttcgtgggcggcatggacttcgacaaacagctcaagcacctcgaagcgcgccattgcgacatcctggtcgcaacgccgggccgcctgctcgacttcaaccagcgtggcgacgtgcacttggacatggtcgaagtgatggtgctggacgaagccgaccgcatgctcgacatggggttcatcccgcaagtgcgtcagatcattcgccagaccccgccgaaaaacgagcgccagaccttgctgttttccgcgaccttcaccgaagacgtgatgaacctcgccaagcagtggaccaccgacccgtccatcgtcgagatcgaagcgctgaacgtcgccagcgaaaacgttgagcaacacatctacgccgtggccggtgccgacaagtacaagctgctctacaacctggtcaacgacaacggctgggagcgcgtgatggtgtttgccaaccgcaaggacgaagtgcgccgcatcgaagagcgcctggtgcgcgatggcgtcaacgccgcgcaactgtcaggtgacgtgccgcagcacaagcgtatcaagaccctggaaggtttccgcgaaggcaagattcgcgtgctggtggccaccgacgtggccgggcgcgggattcacatcgacggcatcagccacgtgatcaacttcaccctgccggaagtgccggacgactacgtgcaccgcatcggccgtaccggccgtgcaggcgcagtcggtgtgtcgatcagctttgccggtgaagatgactcgtatcagttgccgtcgatcgagacgttgctggggcgcaagatcagttgcgagacgccaccgacacacttgctgcgggccgtggagcgcaaacgcccttaaaggctgaaatgcagtaacactgtgggagctggcttgtgtgggagctggcttgcctgcgatgcaatcacctcggtgtgtcagtcacaccacagtgatgctatcgcaggcaagccagctcccacacaggccgctcccacattggtttcagtgcattcaaattccaggaggaaccatgaaccacgccgacttcatcatcatcggcggcggcattgccggggcgtccgccggctactggctgtcgcagcatgcgcgcgtcatcgtgctggagcgcgagtcgatgccgggttaccactccaccgggcgctccgccgcgctgtacatcgccgcctacggcaccccgcaagtccgtgccctgaccctgggcagccgcgcattcttcgaccatccgcctgctggtttcaccgaacatcccttgctgacaccccgtggcgaaatcgtggtggacctgatcggcgatccggtagaactgcaacgccagttcctgaaagccaaggcgctggtgccgcaaacccgcctgctggacgtggaggacgcgatgaacatgatgccgatcctgcgcccggagaaagtccacggcgccttctgcgatccgacggtatgcgacatcgacaccgacgcgctgtaccagggctacctgcgtggcattcggcgcaacggcggcgaaatccacacggacagcgaagtgcaacatctgaaccgcgacgaccaaggcgtgtggcaagtacgcacggcgcaccaacccttcagcgcgcccgtggtgatcaacgccgccggggcctgggccgacgctcttgccgagctcgccggcgtgcgcaaaatcggcctgcaacccaagcgccgcagtgccttcatcttcgcgccgccaacgggggtggatattcatgcctggcccgagctggcagccctggacggttcgttctacatgaagccggacgcgggcatgttccttggttcaccggccaacgccgacccggtcgaaccccacgacgtacagcccgaagagctggacatcgccatgggcatctaccacatcgaagccgccaccaccctcaccatccgccgcccgacacgcacttgggcagggctgcgcagctttgtcagtgatggggatttggtgtgcgggttcgatccgcaggtggaagggtttttctggatcgcagcccaaggcggctacggcatccagacctcgccggccatgggccaggcgagtgcggcgctggtgcggggtgagccgttgccggaggcgctggctggcgtgggtttgaccgaggcgatgctgtcgcccgcaaggctaaatcttcacgcgctctaatccgccgcagatcaaatgtgggagctggcatgtgtgggcgctggcctgcctgcgatgcaagcacctcggtgtttcagttgcaccgcagtgatgctatcgcaggcaagccagctcccacacaagtccacattggcatcaggtattacttccagcgatccgccgccgcatgatcactgctgcgcccttccacccaacgcgcgccttcggaggtgttttccttcttccagaacggcgcgcgggttttcaggtagtccatcacaaacgcacacgcatcaaacgccgcttggcgatgcgcgctggcgacgccgacaaacacaatcggctcgcccggctccagcgcgcccacgcggtgcagcacctccagcttgagcagtggccaacgctgctcggcctcaagggtaatcttggccagggctttttcggtcatgccggggtagtgctcaaggaacatgcccgacacatcgcggccatcattgaagtcacgcacgtagccgacaaaactcaccaccgcgcccacgcccacgttggccgcgtgcatggcattcacctctgcgccggcgtcaaacgcctcggcctgcacccgaatggccaccgtcagcctccggtcacgggcgggaagaacgccacttcgtcaccggcttgcaccggctcatcgaggccacacagctcttcgttgcgggcacacatcaaactgctctcgttgagcaccgcaaactccgggtcactggccagcgccagacgcacggcatcgacggtggcaaagtcgccttccatctccagtgaatcaaaccccaccgcttcggcgtagcgcgcaaaaaacaatacgttgatgctcatgcctggtccgccttgaagtgcccgcttttaccgccgagcttttccagcaggcgtatggtttcgatggtcatgccgcggtccacggccttgcacatgtcatagatcgtcagcgccgcgacgctggcggcggtcagtgcttccatctccacgccggtctggccgctgagcttgcaccgcgcaaggatatgcacggcgtttacgccatcggcgcgcagctcaaccttgacgccggtgagcatcagcgggtggcacaaggggatcaaatcactggttttttttgcggcctggatcccggcaatacgggccacggcaaagacgtcgcccttggggtgggcgccgtcgacaatcattttcagggtctcgggcagcatgcgcacccgcgcttcagccactgcctcacggaacgtcacggctttgtcggtgacgtcgaccatatgggcgcgaccttgggaatcgagatgagtcagcacagggatactcctgatcaggagcggcaattgtaaacccgtgagtcaattttgcgcagggctgtttatgccatgagccagcgctgtcaatgtggcgagggagcttgctcccgctgggccgcgcagcggccccaaaaatgggactgctacgcagtccagcgggagcaagctccctcgccacagattatcgacagcagcgggcgtcagaagcggaaggtgaatccggcgttgatcccgttgttgttgccccggttcgacagcacaccgctgtagctcaaggacaccagcgtatcctgggtcaatgccatttccgcactggccttgatcaccgcgccatcccgggccacgggcacgctgttgacggcaaaggcgttgtcactgccggcaaacttcagcgaagcttcacggtcggtgtcgccgaactgatgctcccaccccaactcaccgcgcaaggtcaccgccgaggtcgagctgatgggcagttgggtatgcgcgcgcaggcccagcgtcgaaagcgtagcgtcctggctttgcttgctggcatgcaacgcggcagcgccgcctttctccttgaacgagtcgctttggtagttcaggtacgtcaggttggcgaagggttcgaacaggttccactgggtgtaaccaatttcggcaaacacctggtcggtgcgggcgttgtagtccgctttgtcatagtccgattggttggcgtaagccacgcgccgcgagctgtcaatccgatgccaggtggtggcaccgcccaaccgcagggcaatcgcgtcgaagcgtttgccgccatacaccgacagatgatagttgtcgctgtccgccgaagccgactcgccattgaggtggctctgggtgtagccggtcgccgcgcccacacgccagccgtcgcccacttcagtatccagccccagcaacacgccactggtggatgaggagtagccactggcattgctgtcaccgctgacgttattacgaccgcccagcagttgcacccagccaccgttgtcatgggtctcgatctgcgcaccggaatccagcgcctgggcttgctgcaagcgaccattcaccgcttcacggaggtaacggctgtcggccatttgcgccgctgccacgtccgaatgcaattgccccgagagctgcttgaacgccgcctgcgcctgtgcggccgagtccgacgccagcaagctttcatacaccggactgcccgtgcccaacgcttcgattgcggtcgctgcggcccgctcgttgcgggtttgcgcgatgctggcgaagctcgtctggttacgctccaccgccagagtcagctggttcggctgataactgagctgggtgccgataaacagatagttgggcgaaatcgccgcaaactgcccattgataccctgggcggcgctgaggatgttgaactgctggccgaccaggctgcgcgcttcgctggcggacaacaggttggggctgttttccagggacacggtcaccacaccgccattgagcgtggcgacgccgctgctctggatctggtcgctgcgcccattggggccgacttcgaccgcgtacaccgagccggggttgaacgtcacatcgccggtgtgcagcgtaccgatcgaatgccccggcgccacacggccgccgttattcacagtcagcacacccaccgacccattgccggccagtgtgccgcccagcgtggtcaccacgccgttaccgggatcgcgcacgcccacggcactgccatctaccgtcacagccgacgtcaacgtgccgtccaccgacagcttgccgccgcgcacccaggtgctgcccgaataggtgttctggccttccagcaacagttcgccgtcacccgacttggccaggctgccgacgtaagtgttgccggtgagcaagtcctgaccgcgtgtcagggtcgcctgctcccgggcatgaccgatttcgtattcgaattgatcatccgccgaggcgttggtcggcaggccgttgagccagcctttttgctgcttggtcgccgcccacgtcgcttgctcggtggcgtcctctacgcggcgtgcgcgaatggcctcatcggaaatcgggttggcccagatatcgcgggtgccgcccggcagtgccaccgccacggcgccgaggaactgccccggcccttgcatggctttttgcaggttgggcaggccccagccactgaccacgcccggcacttgcggcgtgcctggcgcggcatcatgcaccggctgcaggttgtcgtaggtacggccaccggtcaggttgcccacgggcgtgcccggaccgtccggcgcctgcaggctagaggtggtcagcaacacgtcccgcgcctggctggcggtcatgtaagggaagcgctgaatcaccagcgccagggccccggagacgctaggcgcagcggccgacgtgccgttggcattggggatgatttccccctcaggcccggtcgacggaatgcctgaaacgcccatcacacaccaccacttcgaggtgccgcaacggttatagacctgcgcgctggtctcgtcgtaaccggtgatcgagaggaatttgccttcgatgtccggcttgaaaaacggcaggttggcgttggtgtccgggttggcgccgtggctgtcgttaccggcggagatgatctggatgaacgtgttttgccgcgcggcgtcagccatcgcgtccatccaggttttctgcccggcgtgggccttgtcccagaacgggcgataagcggcggtcatgtcgcgcaggttatcggcggcgctgtcgccgacattgccgaagtggttctccacgtcattgcgcgagttttgcccccagctctggttgacgatcgacacattcttcgccgccagcgcgttatagctggccatgaaggcgttgtagtccagatcgttggaaccctggaagcggttgtcatcggtaccgccggtgttcgcgacaaaaatgttcgcgtcaaacgcaatgccatgcatgccggtgccgttgcgactggcgcccagcactccggacatttccgtgccgtggccgtcgttgatggcggggtcgtattcgccggaaatgctgaagtgctcgcccttctgaaactcgccgtccggcgtgtcatggatatagcgcgggtgggtggcgtagtactcgccggtggaggtcaccgcctgaacgcggtcctggccttgggcattcttgccctggaattcgaaatgttcggtgaggatgcccgagtcgagcacgcccacattcacccccttgccggtcatgcccaaggcataggcgtaatacgcattggtgcggtccaggcctgaattgacctgggcttccggggttttccaggtttgcgcgttggcgctccagtcacgcgtggcggcggcccaggactgcccggcattcagttgcccgctcaggttgctgctgacgcccggctccacataggtgtagggcttggcggccggcaggttggcgatgatcgccttggaaaaatccagaatattggtggtgtagcggccgttgttgctgaacagccggctgcggtagtaatccaggcgcgaggcgtagtccagcgggcgtctggtgtcgccaagcatggcgccgatggtcaggttttccggttgcaactcgtagttttgcttgagggccgaatcgaatttgccggactgcgcggcaaaatccttggccgccagatcgacgatatccgcgtaggcaaaccgaaggtttttgtacacatcggtgttggggccaaaggaggcgacggctttcctgaaggctgattccaacacttgagacgtgtaggggttagcgtcatcggcccacgccaaggagccttggcccagccagagcgccaggcccagtgcgataggggttagcggtagtgatttggcgcctgtggcgcgcttgcgtttttcagacaaagtgaagccattacctgctacgtccattcttcctttccctttggataagtgcgtcgtcaatgagcgatgtatcgggctttttgtaataggcagggtcacgcggaaaacccgaaggggtcttcaaacgtcgtcgaatcagggaggtggtgttccgacggggtggtgcagtgttcttattattttcggcgataaaaaatgtaacaaaataaatacaaagaccacaagcacccacggcgcattaacgaattcaaatgtcgcccacaacaaaaaccccggatttcgtgaaaaatccggggcggttcgtggcatttagccactaactacgacatgggtgtgtttacagatgggactcggcgtattcagccagaatcgaacgaggtaccccttgcagcgcgatgtgcacgccgttcgggaagtctttgaaacgttccgtgaggtaagtcagcccggagctggtcgcggacaggtaaggggtgtcgatctgtgccaggttgcccaggcacaccactttggaaccggcgccggcacgggtgatgatggttttcatctggtgcggggtaaggttctggcattcatcgatcaaaatcaggctttgctggaagctgcgaccccggatgtagttgagggatttgaactgcaacggcactttgctgaggatgtagtcgacgctgccatgggtgttttcgtcatccatgtgcaaggcttcgaggttgtcggtgatcgcccccagccacggctccattttttccgcctcggtgccaggcaggaaaccgatttcctggtccaggccctgcacgctgcgggtggcgatgatgcggcgatagcgcttggtcaccatggtctgttcgatggcggccgccagggcgaggatggttttccccgagcctgcggcgccggtcaggttgaccagatgaatgtccgggtcgagcagcgcatacagcgccaggctctggtagatgtcacgcggtttcaggccccaggcttcctggtgcaacaggggttcctgatgcaagtcgaggatcagcagcttgtcgacctggatctctttgatccagcccacaaacccctgttcgtcgatgatgaattcattgatgtgcacggccggcaggttgtcgatcagctgtacctggtgccaggtgcggccatggtcctgacgggtttcgaccttgctcaccaggtcccagaacgagccggtcaccgtgtggtaaccacgggacaacatcgacacgtcgtcgaccagttggtcggtactgtagtcctcggcagcgatcccacacgctcgtgccttgaggcgcatattgatgtctttggtcaccagcaccaggcgcaggtccttgtcgcgcgcgtgcaggtcgatcaattggttgatgattttgttgtcgttcagattttccggcagcaggctgttgggctcgttgcccttgctcatcagaatcgacagcaagcccttgggcccgcttttgccgcgctggatcggcacgccgacttcaacgtcctcgggcgaggcttcacccagggtcttgtcgatcaggcggatggcctggcggcattcggcggcaacgctgtggtgcccgcttttgagtttgtcgagctcctcaagcacgatcatcgggatggcgacgtggtgttcttcgaagttaagcagtgcgtttggatcgtggatcagtacgttggtatcaagcacataaaggattggctggtcggaagaagggttacgtccatgatcatccatactcggtcacctttgtgggagccagtcgacgcaatacctgggcggtgctgcgcctcgattcgaccaccgaatgcacctgagggacgtcaagtgcatgcccacatgaggagtcttggaagacgccacctgtgctgcaggtttcggcgatctgacttcgtaataccgcaaaacacatgacaggaaaaagcactttgacgcttttttgaagtttatttttcaggatgacgaatagcactagccgggtgccagcgaccccgttaaagtcggaagtccgcctgcatcgatttgtcgcgaaaaatcaccccaaaaaagcctcatccccaacagggccggggacttcgcctttttaacgaaaagcttcccggcagtcctgccaacccagcccgctttgcgccgttgcctgcatcagcaggggcaatgccacccgcgccttgtcctgggtgtcgtggaacacaatcacccctttgcgccacagcagcatcagcgtcagcacgcgctgcgccgactcgtccggcttgagcatgcccgggtcgtcctgggaatcgatgtcccacaacgccacctgcaacccctgggcctgaaagaagccctggctgtctgcccggcgttgaccatagggcggacgaaacagcggcacgtagttttccggcatcaggttctgcgccagcgacgcgctgcgggtgattgagctttgccagtccacccaatggctgtgtgagcgatactgccaaccctgaatgcccacgcactggccctggtacaacgcctgcacgtcggccgcagagctgcgctccacgcggtttttcaggctgctgccgagggcgaagaaggtggcgttcatcttttggttgcgcaggtagtcggtgagccagtcggtattgccgctgacgggtgccggtccgccatcgaaggtcagcaggaacatccggtcgttgagctcgtcgccgttgcgctcgtgatcgccgaagcgagcgatctcgctgctgatctgcggaaacagcgcggccttgcgcagcagctcgtcgaggtagcgttcgtggaagtgatgactgggggaagcccaacctatatagaaggagttgtcgctgacttcgaatttgccggcctgttcgcgcaggtcgtccatgctttcgaccaggtagcagaaggacgcatcctcctcgcagctttgctcggcgtgggtgtagttttccagcaggcgttgccagagctggcgacgcaggtcatcgatggaggccatgttgatgatcttcagacccaggcgttgtttgagcgcggcttcatcctgggcttcgctggcgatcaagctgtgggcaaacatcaggatttcggcgcgtgaggcgacatcgaacagcgcggggctgctgagtttttcgggccaggtgccgcggtcaaggctggctacatcgacaggcgcggcgtagatattcaggctgagcaggcaagctgatagtagaagtgcaatgcgcacctgggatctcccattccagagtcgtcgggcactatagctgatcgacgcccacccagtgtgggagctggcttgcctgcgatgcagacacctcggtacatcagccatatccggttaatgccatcgcaggcaagccagctcccacagaaaagaagcctcggcgtctatcagcatgataggtggagtcaaacgccccaaccccctagaatccccccacgattccaggagccaacctcatgctgatggtgatttcccccgccaaaaccctcgatttcgagtccaaaccggccaccccgcgctttacccagccgcaatacctcgaccactcccaggagttgatcgagcaactgcgcgagctgaccccggcgcaaatcagcgaattgatgcacgtctccgacaagatcggcggcctcaatgcagcacgcttcggcagctggacgccagcgttcaccccggccaacgccaaacaggccctgctggccttcaagggtgacgtctacaccggcctcaacgccgaaaccttcacggatgccgacttcacctacgcccaggaccacctgcgcatgctctcgggcctctacggcctgctgcgcccgctggacctgatgatgccgtatcgcctggaaatgggcaccaaactgcccaacgcccgtggcaaggacctgtacgcgttctggggcacgcgcatcagcgaatggctgaatgaagcactggccgcacaaggcgatgacgtgctgctcaacctggcgtccaacgagtacttctcggccgtcaaacgcacagccctgaacgcgcgcatcatcaacaccgagttcaaggacctgaagaacggccagtacaagatcatcagcttctacgccaaaaaggcgcggggcatgatgagccgctttgtgattgaagaacgcatcaacgacccggctaggctcaaggagtttgatgtgcagggctatcgcttcaatgcagagcagtccaagccggacaacctggtgtttttgcgcgatcacgcaccggaataaggccctcaaaaacacagatgttcaaatgtgggagctggcttgcctgcgaaggcggtgtatcagtagcaactttgccaactgacccgccgccatcgcaggcaagccagctcccacattttgtttgtattccaagcccgacaaagtcatttatttgacgtcaaaaaatatcctgacgtattcctaacgaatttttcactcgacattcgtcgttttttttcgtagtggcaccactttttttaaacactggtggcacaaaactatcccccgcctccaactccccacaactactggcccaagtagcaagtgctatcaatatactaccagtgccatcttttctaatatttcaagaaatttcagaaaacaggatgagcggcccggaacttcatcaaaacacgcggctcataccaccggtaacgaaattctctgtttctgtaagagatgacttacatgacgacccaagacagtaattaagttgtcacaacaacttatataggtgggtcacatcatcaactgattgagttgagggcggcgataaggactggttgctatcccctataggccaaggcagcgcttacttgaatgtgtcggtatcaaacactcaaggtgttgatatttataggctattagcctctatcaaccccttgcggcaccggcgccgggcccttccagcaggaagaccggctgcattttagggcaagcccgaataacaaggccaagttgcgcacaacttgagtgcaatagttagtcactcgctaattaacatgcctgtacgcggaaagtcggcgtctattcgcccaacttccgcggcatcagtgacgcttgcaaacatgaactccggccattaattggcatgattaatacagaggtaaacgcgatgcgcatcagcatatttggtttgggttacgttggcgcagtctgtgccggttgcctgtctgcccgtggccacgaagtggtcggcgtagacatctccaaggataagattgacctgatcaatgcgggcaaatcgccaatcgttgaaccgggtctgggcgagctgttgagccagggcatcgaaaccggtcggctgcgcggcaccaccaacttcgccgaagcgatccgcgacaccgacctgtcgatgatttgcgtcggtacgccgagcaagaaaaacggcgacctggaactcgattacatcgaagccgtgtgccgcgagatcggttttgtcctgcgtgacaaagccacccgtcacaccgtagtcgtgcgcagcaccgtattgccgggcaccgtcgccaatgtggtgatcccgatcctggaagactgctccggcaaaaaagccggcgtcgacttcggtgttgcggtcaacccggaattcctgcgtgaatccaccgccattgccgactacgacctgccgccaatgaccgtcatcggcgagttcgacacagcctccggcgatgtcctgcagtcgctgtacgaagaactcgacgcgccgatcatccgcaaggacatcgccgtcgccgaaatgatcaagtacacctgcaacgtgtggcacgccaccaaagtcaccttcgccaacgagatcggcaacattgccaaggccgtcggcgtcgacggtcgcgaagtgatggaagtggtgtgccaggacaagaccctcaacctgtcccagtactacatgcgcccaggctttgccttcggcggttcgtgcctgccaaaagatgtgcgtgcgctgacttaccgcgccggctccctggacgtggaagcgccgctgctcaactccctgatgcgcagcaacgaatcccaggtgcaaaacgccttcgacatcgtcgaaagccatgacaaacgcaaagtcgccctgctcggcttgagcttcaaggccggcaccgatgacctgcgcgaaagcccactggtcgaactcgcagaaatgctgatcggcaagggttacgacctgagcatctacgacagcaacgtcgaatatgcccgtgtgcatggcgctaacaaggactacatcgaaggcaagatccctcacgtgtcgtccctgctcaacgcggacttcgatgatgtggtcaacaactccgacgtgatcatcctcggcaaccgcgacgagaaattccgcgccctggcgcacaacgcaccacacggcaagcaagtgatcgacctggtgggcttcatggccaatgccaccagcgccggtagccgtaccgaaggcatttgctggtaacagcaacggcgagttccaagctgcaagcgtacctccccagcgcttgcagcctggagccttcttcaccttcggatgacgcttatgtccaagttaaaacacgtactccttcaatccgccggctggctgttctttctgagcctgctgatgggactcgccctgctgttgccggcgagtacgttcgactcgcagtcgaagaattttattttcctgattggcgctgtcggtatctggcgctactcgatgggtgctacgcatttctttcgcggcatgctgttcctctacgtggtctacccgcacctgcgccgcaaggtacgcaagctgggcaagtcggcggacccctcccatgtattcctgatggtcaccagttttcgtatcgatgcgctgaccaccgcgcaggtgtacagctcggtgattcgcgaagccatcgaatgcggcttccccaccaccgtggtctgctcgctggtggaaatgtccgatgagctgctggtgaaaagtttgtgggagcgcatgaacccgccggaccatgtgaagctcgacttcgtgcgtatcgccggtaccggcaagcgcgacggcctggcgtttggttttcgcgccatctcccgccacttgccggatgaccgtgccgtggtggccgtgatcgacggcgacaccgtgctcgccgaaggcgtggtgcgcaagaccgtgccgtggttccagctgttcggcaatgtcggcggcctgaccaccaacgaattctgtgaagtgcgcggcggctacatcatgagcgagtggcacaagctgcgcttcgctcagcgccacatcaacatgtgctccatggccctgtccaaacgcgtgctgaccatgaccggccgaatgtcggtatttcgcgccaacgtggtcaccgaccccggctttatcgccgatgtggaaagcgactcgctgcaacactggcgcctgggccgcttcaagttcctgaccggtgatgacaagtccagctggttcagcctgatgcgtctgggctacgacaccttctacgtgccggacgcggccatccacaccgtggaacacccgccggaaaagagctttatcaaggccagccgcaaactgatgttccgctggtacggcaacaacctgcgccagaattcccgcgcccttggcctgggtgtgcgccgcctcggcctgttcaccagcgtggtgctgttcgaccagcgtgtgtcgatgtggacctccctgctcggcctgaccgtggcaatcatcgccaccttcaagtacggcggcgcgttcatcctcgcctacctgctgtggatcggcattacccgcctgattctcaccctgttgctgtcgtgctccggccacaccatcggcccggcttaccccgcgattctctattacaaccagatcatgggcgcgctggtgaagatctacgtgttcttccgccttgatcaacagtcctggacccgccaggacaccaaactgacccgcgatttggccagctttcaacgttggttcaacacctggtcgtctcggaccatgaccttctccgccggcagcattttcgtcgccgtgttgctgatgatggtctgaccctgccaagcctgaattaactaggaactacacaccatgaatagccaagcaaacgtcaacgttgtccacgaatccgaagcccagcgccaacatgcccgcgtgaaaatcccggccaagctgcgcttcttcaacaccgaccgcacgccgaccgaagcccgggtgatcgacctgtccgccggtggcctggccttcacctcgacccagccgttgaccgtcggcgaagtgcacaagggccgcctgcaattcgtgatcgataacctgggcctggcgatggatgtggagctgcagatccgttcttacgaccgccagagcggccgcaccggttgccagttccagaacctggaacaacaggatatttccaccctgcgccacctgatcacttcgcacctgtccggtgacatcgtgaccatgggcgacgtgctcgccaccctgcaacgcgacaacttcaccaaggcgcgcaaggtcaaagacagcggcagcggcatgaccgcgttcggtcgcctgcgagccgtgaccttcagcgcaggcatcttcatcgtcggcctcgctgcgttcggtttcgtgttcaagtcggtgtacggcatgtacttcgtcagccacgcccaggccggcctggtcagcgtacccggcatgaacgtgacgatgccgcgcgacggcaccgtgcaaagcctgctcaaaggtgacgcgatagccgccaaaggtgcgccactcgccaccttcagcaccagcatgctcgacgtgctcaaaggccacctggacgaagaccaactgcaaccggccaaggtagaagagctgttcggcaagcaaatgaccggcaccctgacttctccgtgcgattgcgtcgtagcccagcaactggtcgccgacggccaatacgccagcaaaggcgacgtgattttccaactggtgccacggggcagccaggccaatgtggaagcgcgcttcacctatcgccagttcgccgacgtgcgcccgggcaccccggtgaacttccaggtggccgatgaagaacaagtgcgcaccggcaccatcgtcagcagcaccagcctgaacagcgccgatttgtcctccgacatccgcgtgcagatcaagcctgacgcgccgctggacagcacctacgccggccgcccggtggaagtgaccagcgaccgtggcccctcgctgaactggctgatcgacaaagccatggccaacggtctgtaagcagaggacatgcctgtgatgactctcccaaaaacaccactcccccctgtgggagccgggcttgcccgcgatggcatcgactcggtacacccgatacaccgaggtgcccgcatcgcaggcaagccagctcccacacaaggcagatcgcatgcagccgccgtgtattgtgctctggcactggccgtcagcctggccggttgcgccggcctgcccgaccagcgcctggccaatgaagcgttgaagcgtggcgacaccgtcaccgcccagcagaactaccagcaactagccgacctgggttacagcgaggcccaagtgggcctggccgatatccaggtgaccacccgtgaccccgagcagatccgccaagccgaagccacctaccgcgccgccgctgacacgtcgccgcgcgcccaggctcgcctcggtcgtctgctggtggccaagcccggtgccaccgaagccgagcagcacgaagccgaaggcctgctgaaaaaagcctttgccaatggcgagggcaacaccctgattccgctggcgatgctctacctgcagtacccccacagcttcccgaacgtgaacgcccagcagcaaatcaacacgtggcaggcggccggttatccggaagccgggctggcccaggtgctgctgtatcgcacccaggacacctacgaccagcacctggatgacgtggagcgcatctgcaaagcggcgttgaataccaccgacatctgctacgtcgaactggccacggtctaccagaaaaaagccgagcccgagaaacagaccgagctgcttaaacagatggaagccggctacagccgcggctccgtcaccgcgcagcgcgtggacagtgtcgcccgcgtgttgggtgatgcaaccctgggcaaaaccgacgagaaaaccgcccaagccctgctggaaaaaatcgcccccggctaccctgcgtcctgggtcagcctggcgcagttgctctacgacttccccgagttgggtgacgtcgaccagatgatgaagtacctcgacaacggccgcgccgccgaccaaccgcgcgccgaactgctgctgggcaagctctattacgaaggcaagtgggtgccggctgatgccaaagccgccgaagcgcatttcgaaaaagccgtgggcaaggaagtcgccgccgactactacctcggccagatctaccgccgtggttacctcggcaaggtctattcgcaaaaagccctcgaccatttgctgaccgctgcgcgcaacggccagaacagcgccgacttcgccatcgctcaattgttttcccaaggcaagggcacccagcccgacccattgaacgcctatgtcttcagccagctggctaaagcccaggacacgccagaggccaatgatttggccacgcagctcgaagccccgctgacgcctgagcaacgcgccgaaggccaacgcctggtgcaacaggagctggccacgcgcggcaccctggcccagagcacgctgcaactgcacgccctggaagacgaagacggcgaggaatccctatgaagctcaacccattcgtcaaggccggtatcggcctgaccttcgccctgctgtggtcgtgcccgaccctggccgcgctgaccgaagccaagaactttggccttgaagtcaaagccaccgcgcagtccgaagacgaccgcgacctcggcacgcagaaaggcggcgacgtcaacggcatcggcctcgatctgcgcccgtggatctacggcgaaagcggcgcgtggagcgcctacgccatgggccaggccgtgacctccagcgacatcatcgagaccgacacgctgcaacagtcggccgacgacaccacggaacaatcgagcaacgacgaccgcaaggccaagaaaaactacctggccctgcgcgagttctgggtcggctacagcggcttcacgccttaccccggcgagatcctcaagttcggccgccagcgcctgcgcaatgacgacggccaatggcgcgacaccaatatcgaagcgctgaactggaccttcgacaccaccctgctcaaggccaatgtcggcgccgccgaacgcttcagcgaataccgcaccgacctcaaggaactgtcgcccaaggacaaggaccgtcagcacttctacgccgacgctgcctaccagtggacgccagggcagtggatcggcctgcgtggtcaccacacccatgacgacggcaagctcgactacgccgaaccgggcgtggccaccgacccgttggacaaacgcgagaatggcgacctgacctggctcggcatcgaagccaacagcgacgcctataactggcgcaacaccaacacggtgaactactgggccagcgtcaccggcatgaagggcgaccgcgacacggtcaacgccctcaacgccgacggcactcgcccggccgaagccaagcgcagtgatgacgtgagtggttgggccactgacctgggcattcgcttgcgcctcgacccgcagtggcaagtcggtgcggcttattcacgcgccagcgccaactacgaacagaacggcctgcaaagcaaccgttcgaactggaccggcacccagtcccgtgtgcaccgcttcggcgaagccttccgtggcgagatgaacaacatgcagtccatgagcctgttcggttcctggcagctgcgcgaggactacgacgcgagcctggtctatcacaagttctggcgcgtggacggcaataagccggtcgggagcaacggcatcgatgcggtgcagaacaacaccgacgacgtgactggcgcgatcctgtccagcacgtccctgccccttgaagacggcaagaaagaccttggccaagagatggacctggtggtcaccaagtacttcaagaaaggcctgctgccggctgcgctcagccagtcgatcgacgagccgtcggcgctggtgcgtttccgtgccggcgtgttcaagccgggtgatgcctatggcagcggggtcgactcgtacatgcatcgcgcgttcgtcgacgtgatctggaaattctgatgggagcctgcgcaatgaatgctcaaagcctactcgtcgcggcaatgctggtggccagcgccccagcgtttgccgacgcgacggccaaggcgccgaccatcgccaaggaactgcaacaggccaagacctacaccatttccagcccgccgactgcgccgctggagatgcccaagccagccctgccggacctgtcgggctacaccgctgcggcgatggaaaagaagatcatgcgcggcaagccgggcaaaatcagcatccgccgcatgatgcaggaagacgcgctgaaagactttattggcggtgacaacaagatggccgaatgggtggtgcgccagcacggcattcctcaggccatcttcgttgacgacggctacctgaacctcaaggacctgctcggcaaggtgcccaagcagtacctcagtgagacctcgccgggcgtgttcctggccaagctgccgatcgtggtcgggcgcaagggcattctggaaatcgacaagaaaacccaggagctgcgcctgtcccagcaagccggttcattcctgatcaacgacggccagctgttcgtgcgtgacaccaaaatcaccggttggaatgaaaaaaccaacggcccggcgctgttccagtcgcccaaggaattccgcccgttcctgctggcctggggcggtaccgagacctacatcgcccacagcaagatggccagcttcggctacgccaacagcaagtcgtacggggtgagtatttcccagtacacgccgaacatggccaaggtgctcaagcgccctgagccaaccggctggatcattgattccgagttctccgacatgtggtacggcttctactgctacgagaccaccggttttgtgctcaagggcaatacctacaaagacaacatcgtctacggcattgacccacacgaccggtcccatggcctgatcatcgcggacaacaccgtgtacggcaccaagaagaagcacggcatcatcatttcccgggaagtgaacgacagcttcatcttcaacaaccgcagctacgacaacaagctgtcgggcctggtgatcgaccgtaacagcgtgaacaacctgatcgccgacaacgagatctaccgcaaccacaccgacggcatcaccctctacgagagtgccgacaacctgctgtggggcaacaaggtgatcagcaaccgtcgccacggcatccgcatccgtaacagcgtgaacattcgcctgtacgaaaacaccgccatggccaacggcctgaccggcgtgtacggccacatcaaggatttgaccgacaccgaccgcgacatcgccctcgacccgttcgatgccaaggtctcgctgatcgtggtcggcggtgaactggccggtaacggcagcgggccgctggccatcgactcgccgctgagcatcgagctgtaccgcgtgtcgatgctggcgccgaccaaatccagcggcatcagctttaacggcgtgctgggtgatcgtcaggaagaaattctcgacctgctggtgcgccagcagaaagccgtgctgatcgaccctgtcgaacgccagaccgaaatgcaggactgaggatgacccttatgcacccacacatgatcaaactgctcagcctttcgggcctgaccctcggcctgctcgcggccagccagggcgtgcgcgccgacgaagccaaagcgccaagcttcaccgccgaaccgtgctgcagcctgtgcccggcagcgcatgacgcaaagaactacaccacgcgctaccagcagaacttcaccaccctggtacaagcccaaggcgactggctgttccgcacccaggaagacctgcgcaccgaattcgacaccagccccgccggctacaaacgcatgcaacagttgcacgatgcgttcaaggccaagggcgtggaattggtggtggtctaccagccgacccgtggcctggtgaaccgcaacaagctcaacccggaagagaaagccaaattcgatttcgacaaggcactgggcaactacaagaccatgctcggccgtttcgccaagatgggttatgtggtgccggacctgtcgccgctcaccaatgaacaactgccggatgagctgcctgcccacgatttctacttccgtggcgaccaacactggacgccgtatggcgcccaacgcacggcgaaaatcgtcggtgccaaggtcaagcagatgccggaattcgccgacattcccaagcgtgaattcgaaaccgtgcggtccgggcgcatgggcaagaccggcaccctgcacaacatggccgggcaactgtgcggcaccagctacgcgatccagtacatggaccagttcaccaccgaacccaagggcgaagcgggcgacggcgacctgttcggcgactcgggcaacccacagatcaccctggtcggcaccagccacagcggcaagaactacaacttcgccggctttctggaacaggaaatcggtgccgacattcttaacgtcgcgttccccggcggtggccttgaaggttcgatgatccagtacctgggcagcgatgagttccagaagagcccgccgaagattctgatctgggaattctcgccgctgtatcgcctcgaccaggagaccatctaccgccagatgatgtcgctgctcgacaacggctgcgaaggcaagaccgcgcagatgagcgcgagcaccacgctcaaacccggcaagaacgaactgctggtcaacagctcgaacaaagacctgcgtaacgccagtcaccaggtcgatatccgcttcgccgatccgtcggtgaaaaccttgcaagccaccctctggtacatgaacgggcgccacgaggacctcaagatcgaaaaacccgaaacatccgatacagacgggcgtttcgccttcgaactgcgcaccgatgaagactgggcctcgcagaacttgctggccgtagaagtgcaaggccccgaagcgggccaggccgcgcagaaggttgaagcgaaaatttgcacacgcaacgtgttccccagcggtggtcagcagaccgcccaactggggcaatgaggttacctatgcagaagttattgattccatcgttgctgggcctggcgatcttcgccggcgcagccaacgccgccgccccactgcgtccgccccagggctactttgcgccggtggaagccttcaagaccggcgacttcaagaatgactgcgacgccatgccggcgccgtacaccggctcgctgcaatttcgcagcaagtacgagggctcggacaaggcccgcgccacactgaacacacagtccgaaaaggcgttccgcgacagtacggccgacatcaccaagctggaaaaagacaccagcaagcgcgtgatgcagttcatgcgcgacggtcgcccggagcagctggaatgcaccttgaactggctcaccagctgggccaaggcggatgcgttgatgtccaaggacttcaaccacaccggcaagtccatgcgcaaatgggcgctgggcagcatggcctcggcctatgtgcgcctgaagttctctgactcgcacccactggccaaccaccagcaggaatcgcagttgatcgaggcgtggttcaacaaactcgccgatcaagtggtcagcgattgggacaacctgccgctggaaaaaaccaacaaccactcctactgggccgcctggtcggtgatggcaacttccgtcgccaccaaccgccgcgacctgtttgattgggcggtgaaggaatacaaggtcggcgccaatcaggtggatgaccaaggcttcctgcccaacgaattgaagcgtcagcaacgcgccttgtcgtaccacaactacgccctgccgccgctgtcgatgatcgccagttttgccttggtcaacggtgtggatctgcgccaggaaaacaacggcgcactgaagcgcctgggcgacaaggtgctggccggggtcaaagacccggagatcttcgagaagaagaacggcaaggaacaggacatgaaggacctcaagcaagacatgaaatttgcctggcttgagcccttctgcaccctctacacctgcgccccggatgtgctcgagcgtaagcacgggatgcagccgttcaagacgttccgcctgggcggcgacctgaccaaggtctacgacccgacgcatgagaaaggcaacaagggttcctgacgaaacgcagttcaaatgtgggagcgggcttgctcgcgaaggcggtgtgacagtcgccatctgtgttgaatgacacaccgcattcgcgagcaagcccgctcccacagtttgagccggtttcgtcagtaggaatgttgtaccgccctcccccgaaatcgtggggggggtttgggggggctctggcccttgactgtctgttaaacatggagagatcgggatggttttctcgtccaatgtgttcctgtttctgttcttgccgatctttctcggcttgtactacttgagcgggcaacgctatcgcaacctgctgctgctgattgccagctatgtgttctacgcctggtggcgagtggacttcctggcgctgttcgccgccgttacgctgtggaattactggatcggcctcaaggtcggtgcggcaggcgtgcgcaccaagcccgcccagcgctggctgctattgggcgtggccatcgacctgtgcatcctcggctacttcaagtacgccaacttcggtgtcgacagcatcaacgtgatgatgaagtccgcgggcctggagccgttcatcctgacccacgtgctgttgccgatcgggatctcgttctacatcttcgagtccatcagctacatcatcgacgtgtaccgcggcgatacacctgcaacccgcaacctgatcgactttgcggcgttcgtggcgatcttcccgcacctgattgccggcccggtgctgcgctttcgcgacctggccgaccagttcaataaccgcacccacaccctcgacaagttctccgagggctgcacgcggttcatgcagggtttcatcaagaaggtgttcatcgccgacacccttgcggtggtcgccgaccattgcttcgccctgcaaaacccgacgacgggcgatgcctggctcggcgcactggcttacaccgcgcaactgtatttcgacttctccggctacagcgacatggccatcggcctgggcttgatgatgggtttccgcttcatggaaaacttcaagcagccgtacatcagccagtcgatcaccgagttctggcgccgctggcacatcagcctgtcgacctggctgcgtgactacctgtacatcaccctgggcggcaaccgtaaaggcacgctgaccacttaccgcaacctgttcctgaccatgctgctcggcggcctgtggcacggcgcgaacatcacctacatcgtctggggcgcctggcacggcatgtggctggcgattgaaaaagccatcggcctcaacactgcgccgcgcagcttcaacgtggtgcgctgggctttcaccttcctgctggtggtgatgggctgggtgatcttccgcgccgaaaacctgcacgtcgccggccgtatgtacggcgcgatgttcagctttggcgagtggtcgctgtcggaactcaaccgcgccagcctcaccggcctgcaagtggcaaccctggtggtggcgtacgcaaccctggcgttcttcggcctgcgcgatttctacaccaaccgccccgccgaaaaaaccaagccagccgacccgagcctgatcaaggccgtgccgggcgacaacccaggcagcatccaccagccagggttcaccgtgggcaaagacgccgccgtgcaaccggcctactggaccgctgacctgccacgttacgccatgcgcgctgccgtgctgctgctgttcgtggcgtcgattctcaaactgtcggcgcagagtttctcgccgttcctttacttccaattctgagggagccgaccatgacccgttcattacgcgtcctctatatcgcactgttcctgctggtgctgctggccctgggcgcctggtcgatgcgcagtttcttcggcttcagcaccaatgccgacgctaccgtgcttaacggtcgctggaccaaagccgtcgagacccattacgacgacgagttcccgatcaagcgcctgggcaccaacctctgggcggcgctggactacaagctgttcaacgaaggccgccccggcgtggtgctgggccgcgatcactggttgtacagcgacgaggaattcaaccccgccgtcaatgaagaccagaacctgcaaggcaactacgcgctggtcgaaggcgtgcgtcagaagctcaaggcccagggcattcaactggtgatggcgatcgtgccggccaaggtgcgcctgtacccggaacacctgggtgatgtgaaaccggcgagcatccacgccaacctgtatcaggatttccacgcccgagtggcggccgacaagatcatcgcgccagacctgctcggcccgctgcaacaggccaagctcggcggccagcaagtgttcctgcgcaccgacacgcactggaccccggacggcgctgaaatcgccgccaaacagttggccaaagtgattgccgccaagacgccactgagcggcgaaccccaacgctttgtcactgaggccgaaaaaaccgagccgcacaaaggcgacctgcgcctgttcctgccgctggacccgctgtttgaaaacctgatgccaccgaaagagccactggaaaaacgcgtcacgcacctggccgaaaacaaaggcgacgacgccctgttcaccgacagcgaaaccccggtggcactggtcggcaccagctacagcgccaacccgaactggaacttcgtcggcgcgctcaagcaggccttgcacagcgacgtcatcaactactccgaagacggccacggcccgatcctgccgatgctcagctacctgaaaagcgatgacttcaagaacagcccgccgcaagtgctgatctgggagttcccggaacgttatctgcccgtcaacaacgaaatcggtgacgccgacccgcagtgggttgcgcagcttaaacaagccggttcgcgccaacagaacatggcattgaacacccttaaaaaatccgagacgcccgaccgggcgcaaaactgaaagagaggtaactcacatgactttcactacaactcctcgtcgtctcgccaagaccctggccctcgccgccggcatgagcatcgtatcgatttcggcctttgccggtgatgccgccttgtacggccctgtcgcacccaaaggctcaagctttgtacgggtctataacgcgtcgaaccaggaagtcagcgccaccgtcggcgccaccaacctgagcgacgttgcgccactggccagcagcgacttcagcttcatgccgggcggcgactacagcgccaagatcggcagccagaccgtgccggtcaaacttgctgccgaccattactacaccctggtcaacagcggcgccggccagccacaactgatcgaagagccaccgttcaagaacaagcagaaatccctggtgcgcgtgcagaacctcagcgacaaggccctgaccttgaagactgccgacggcaagaccgacgtggtcaagtcggtggccgccaaaggccgtggcgagcgtgaaatcaatccggtgaaagtgagcctggcgttgtatgacggtgacaagaaagtcggcgatgtgaagccggtggcgttggaacgtggtgaagcggcggtgctgtatgtgaccggttctggcgcgagcatttcgccagtttgggtgaaacgcccagtgtcgacccgctaatgattttcctgagttgacacgccccatgtgggagctggcttgcctgcgatggcgatcttgaaggccccatcgcaggcaagccagctcccacactgcccgcgtttcaactcgggacacgagacaaaaacaagagtgaaacgacaaaccttcgtagctctgacccaaatcgattcaaggagaaacagcatgatcccagtaatcctttccggtggtagcggctcacgtctttggccgctttcccgtaaacagttcccgaaacaattcctcgccctgaccggcgagcacacgctgttccagcaaaccctggagcgcctggtgtttgaaggcatggactccccgatcgtggtctgcaacaaggaccaccgtttcatcgtcaatgagcaactggccgcccgcaagctggaaagccaacgcatcctgatggagccgttcggccgcaacactgcgccggccgtggccctcaccgcgatgatgctggtcaatgaaggccgcgacgagctgatgctggtgctgcccgccgaccacgtgatcgacgaccagaaagccctgcaacgcgccctggccctggccaccgtggccgccgagcgtggcgaaatggtgctgttcggcgtaccggcgacccgcccggaaaccggctatggctacatcaagtccaccgctgactcactgctgcctgaaggcgtcagccgcgtgcaacagttcgtggaaaaacctgatgaaaaacgcgccgtcgagttcgtcaaaagcggcggttatttctggaacagcggcatgttcctgttccgcgccagccgcttcctcgaagagctgaaaaagcacgatccggacatctacgacacctgcgtgctgaccctggagcgcagtgaacagaccgccgacacggtgaccttcgacgaagccaccttcgcctgctgccccgacaattccatcgattacgccgtgatggaaaaaacccagcgcgcctgcgtggtgccgctgagtgccggttggagcgacgtgggttgctgggcgtcgctgtgggcggtcaacgataaagacgtgcacggcaacgtgagcaaaggcgacgtggtcatccaggacagccgcaattgcatgatccacggcaacggcaaactggtgtcggtgatcggcctggacaatatcgtagtggtggaaaccaaggacgcgatgatgattgcccacaaggacagggtccagggcgtcaagcagatggtctcgaccctcaacgaccagggccgcagcgaaacccagaaccactgtgaagtctatcgcccgtggggctcctacgattcggtggacatgggcgggcgcttccaggtcaagcacatctcggtcaagccgggcgcgtgcctgtcgctgcaaatgcaccaccaccgcgccgagcactggatcgtggtcagcggcacggctgaagtcacctgtgacgaaaacgtgttcctgctctgcgaaaaccagagcacctacatcccgatcgcctcggtgcaccgcctgcgcaacccgggcaagatcccgctggaaatcatcgaagtgcaatcgggcagctacctgggcgaagacgatatcgagcggtttgaagatatctacggccgctcgacgccggttgagcgtggtgtgtcggtgaaaactatcgcgcagtaacacagtcgtacaagaagccctcgcccagcccattgcgtcccctatccgcagtgggttgggtgggggctttttctttgggccttgcggtgatgccaaaggcctcatcgcaggcaaaccagctcccacagtagaccgggtacatccattggaatgcagtctaatgtgggagctggcttgcctgcgatggcgtcccaaagaacaccggatagtcaacctgcctcccccacagtaggatggcctatccattcctgaggcagcctccatgttcttcggcgttctcctgatcatcacctggctgatcctgctgttgcgttaccccgccaaggccttgccggtatcgctggccgccgccgtcggcctgggttttgtggccgtctgggtcgtctggctggacaaccgcgaagcctcgcaactggcgcgcctggagctgcgcatcacctacgcacccgaggaatgccccgccgaccgcccgctgaaactggtcctcaacaacggcaacgacgtgccactgaccgaactgcgctggcgcctcgccgcctatgcaccgggcgacacggtgaacctggccgataacgtctacgctgcaccccgctatcgtggccccggcgagttgcaagccggcgccacttgggacgactgcctgcccaccccgcctttgcgccccggctaccgcccgcaaacgcttgaatttcgtgccgagcacctgcaaggcagtttctcggactgacaaaggattgacccatgcccaatgtactgatcaccggctgttccagcggcatcggccgtgccctcgccgacgccttcaaaactgcaggctatgacgtgtgggccagcgcccgccgccccgaagacgtcgccggcttgtccgccgccggcttcaacgccgtgcaactcgatgtcaacgacagcgccgccttgcagcacctggccgagcaatggggcgagctggatgtgctgatcaacaacgccggctatggcggcatgggcccgctgctcgatggcggcacagacgcgatgcagcgccagttcgagaccaacgtgttttccatcgtcggggtgaccaaggcgctgtttccggcgctgcgtcgtggcaaaggcctggtggtgaatatcggcagcgtttccggagtgctggtcaccccgtttgccggcgcatactgcgcgtccaaagcggccgtgcatgcgttgagcgacgcgctgcgcatggagctcgcgccgtttggcatccgggtgatggaagtgcagccgggtgccatcgacacaagtttcgcgaaaaatgccggggcccaggccgaactgctgatcaacgaacagtcgccctggtggccgctgcgcgaaggcattcgcgcacgctcacaggcttcgcagaacaacccgacctcggccgaccagtttgcggcgcaggtactcaaggccgtccaacaatcaaacccgccccggctattgcgcgcgggcaatggttgccgggcgttgccgttgatggccgccttgttgcccaagggcttgctggagaaggtgttgaagaaacgctttggactcgccggctcgctctagcccttcataaaatcaataaacgcccgcaccttcagcggcaaatgccgggtgtccgggtacatcgcataaaccccttgcgcggcgaagcgatggtccggcagcaggcgcaccaaccgccccgcctccagatccgcctgcaccagccactgcggcagcaccgccacgccgtgcccgcgcacggcgaaggcctggagcacggcggcgctgtcggcgaccagcgcggtttgaccgatgcggtatggatgttcgacgccagaggcgtcggtgactgccagctccgtcaacctgccgtgccccagcctcggcacctgctccaactcatcaagcgttttaaccccggcaaacactggcgctgcgacggcgaacacgtggaatgtcgataactgcaccgcgcggtgattggagtccagcaggcggcccagtcgaatcgccacgtcaaaacgctcggagatcagatccgcgtgggtcgaggaggtggataagtgaatgttcaaatccgggtgcaggcgacggaacgcctcaatcgccggcgccaccaccgccagcgcgtattccactgtggtggtgatgcgcagcgtgcccttgagctgggcgtgttccgagcgggcctcttccaccgccagttgtgcctcttccagcacccgcgtgcagcgttggtaaaaccgctcgcctgcatcggtgagcgccaactggcgcgtgttgcgggtcagcagcgtgacacccagctcggcttccaggcgcttgagattgaagctgaccaccgcgcgggtctgacccaggcggtcggcggcagcggtgagcgagccagcctcgaccacggccttgaaggtgtcgaatcggtccaggctgaccataggccgcgccctcctttgtcaaaatatttttgacaaactaacaggagaaccgctgtatcccaaacgccgctgcgcgcctaccctgcctgctcaacccgcaggatcgcccttcgatgacctaccccacaaaagtcgcctggatctttttactgggcttcgccctcgacctggtgaacatgtttgtcgccacggtcgcctacccggatatcgcccgcgagctgcatgcgtcggtcacgcaactggcatggatcagtaacgcctacatgcttggccttaccctgatcattccgttaagtgtgtggctggcggcgatcatgggcgagcgccggctgattggggcgagcctgtcgctattcgcgggcgcatcactgatggtcggccaggccgcctcaatcgaagcgctgatcggctggcgtgcagtacaagggttggggggcggattgttgatcccagtgggtcaggcgatggcttaccggcaatttccggcggcacagcgcagccatctgacggcacgtgtgatgtcggtggcgctgctggtgccggcgttgtctccagctctgggtgggttgatcgtcgacagcgtgtcctggcgctggatcttttacgccaacctgccgctggcgctgttcacgttgctgctgacaatgctgtggataaaacccgatgtgcctgcagctgtacgccccagcctggatcttggcggtattttcactcaagcccgcagcccgatgctgcgcgtcgcgatgcttatttacttgttcattcccggcgtgtttatcggcaccagcctgatcgccatcctctacctgcgcggcctgggttatgacgccacacgcaccggcgtcttgatgttgccgtgggcactggcgtcggcgctggcgatcttcctcagcaaaaaactgttcaaccgctgcggcccaaaacccttgctgttggctggcatggtgttgcaatgcatcggcatcctgttgctcaacacggccttgatcattcccgcttacctgttgatgggcctgggcggcagcctgtgcagcagcacggcgcaaaccctggcatttctcgacattcgcgccgagcgcatgggccacgccagcgccttgtggaatatcaatcggcaaatcagcttttgcctgggcgccgccgtgctcagcgcgttgctgtcggccttggattctttcgccataaccttcacgatagccgcagccctgacactgctgccccttttcgcggtgctgcgcctggacgcttccagagtacggacactgcttcaccctgccagcgagccccaacgatgattgattacagcgatttttttgaggaagtgatccagacccacgtcgagatcgaacagtggtttgccggggttgcgcctgaaggtatcttgcagaatctgctcgcgcggttctcgccggagttcagcatggttgcccccgccacgggcacgcgggtgaatgccgccggggtgaacgccttgttcacacgcctgggcggcatgcgcccggggttgaaaatcaccttgagcgaaatggccgggatcgaccggcatgcgcgcggggcgacggtgacctaccgcgaacatcagatggatgacagcggtacgcagacggatcgacgcgccacggtggtgttcgagaagcaggcgagtggcgcattgctgtggcgccatctgcacgaaaccttcatcaaggcctgaggcggtcaaaaagatgtgggagctggcttgcctgcgatagcggtgggtcagctacaaagacttcaactgacagcccgcaatcgcaggcaagccagctcccacacgagcctgctcctgcagttagattggtgtggggttgacgatcacggtgcaggtgatgcccgccgccagcagcacgccctgtggcacttcatcaatgtgaatgcgcaccggcacgcgctgggccaggcgcacccagttgaacgtcgggttcacatcggcgatcagctcgcggctctcggggttgtcgcggtcgtagatgccgcgcgagatgctttccacatggcccttgagcgtctcgccgctcatcaactgcatatcggctttgtcgccgacgttcacatggggcagtttggtttcttcgaagaagccatagacccagaatgagttcatgtcgaccacggccatcttggcttcgccgatgcgcgcgtagtcgccacggtgcacgttcaggttggtgacatagccgtccaccgccgccaccacttgcgtgcgtttcaggttcagctcggccccttccagctgggccagcgcgtgctggtaatcagccagggcggagtcggcgatgttgctggcatcgtcgcggttttccttcgagatcaccagcgcatcaaggtcagcacggcggtgggcgttgaccttgcgcatctcccaggtggctttgcgtgaagcgaccagtgactgcgcttgcttgaccgcaatgcggtagtgctcgggatcgatctgcatcaacaggtcgcccttcttgaccaactggttatcccgcactggaacatcgaccacttcgccggtcacgtcggcggcgacgttgataatgtcggcgcgcacgcggccgtcgcgggtccagggggtctgcatgtagtgcacccacaatgtgcggccaatccagatcgccaaggccagtaccagcaaggtcgcgagcaggctgaaaaactttttcatcggggcattctcaacggtagacagtcagcgccagcgcgccgaacaggcaaacgaacaggctcaggcgcagcaacgccgggtgccagaaaaaacggtacaggtcgaacccggccaggaagcgatccacgccccaggccagccccgccgcgatcaggaacatcagggtcatggtcggcatgtagatgccgtggaaggcgatttcacggggcatgcgaggctcctttaagggccgccaacggcgattgcgggtccagcagcgaggtgcggataaagtgcaggtagcttttcacccggcgcagggccgaggtgtcgaagtgcggcgcgaagggttcgtcggtggcctgcacgcggctgatcgcgtggtcaacggcaatcaggctgcgttccaggttgctcgcgctgggttgcaggaacagccgcaccagcgaacgccccatcacgcggatcgcctggcgccacggctgggattcggcatacgccgggtgcaccggcaaaattgcctgttccttgcgcaactcgataatcgcgtgcccgacctccagcaccacaaacatccagcgcaacaggtcacgctgtacttgcggctggccgacggcgaggccgtaagcctggtgcagcaggtcgcgggtacggctttcgaagcttgaggccagccccttgagtttgccgctgatggcgtacaccacctgctcgcgcaggtcctgctcgaggcggcgccacagccagcggctgttgggcggcaggatgatcgcccccgctgccgcgcacaccagcatgccgatgaccatggcgatgtagtcgttgatgaaggtgtaggggttgtagaccgtgaggttgtcgggcaccgagccggtgctgaagaagatcagcaggcccacgccaacacctgcgtactgcgggcgtgatgccaggaacgaaccgaagatgatcaccggcgcaagcatcacgcacagcagcgggaagccgtcgatccaggggaacacgaagaacatttcgacaaagcccaccagcgcaccgatcaaggtgccgcaggccatctggaacgccatgcgtttcgggttgggcgtggcggcagacaggcccacggtggcggcggcgatcagggtcatggtcgcgccgctgggccaggccgtggccacccagtaactgccgagcactacaagcatgaatgacgcgcgaatgccggaagcagcgcaggccagccagttggtcttgggagtaaaagtttcgtcccactgctcgcgttcatggcggtggtcggccagcgatgcgtgggtctgcgcgtagttgtgcaggtcgtcgacgaagcggtaaagcagctcgtaagcggtgtggaaatccagttgctcggcttcggtggggtcaccttcctggaaggtcgcacgcaaagctcgcaccttggcgggcaagccgtctttgtaggcggtgagctgagccaccaaccgcgcagcgtcgggactggtgagggcgcggccagagaagccatctagcagttcggccaggtcttgcagaccgggtttgatcgcagcgaccacgtggtttgcctcatcggcgcgcaggcgttcaagcaactggtgcaaggcattgaagcgcgtggtgaggctcatgaattcgctgttcaagcgactgagccgaccattgcgccgacgcatgtgcgggtcctcgaacacggtaaggctacgcagcccttccagcccaacggcttcggcgataaagcgcacgttgctggcctcgaagccttcgcgcccgctgcgcccacgcaggccgtcggtgacaaacagcgcgaacacgccaaaacgctggtacaaggcgttgcgcatggcagcgctggacgtctgcggcaggatcgcggcgctgaccagggtggagcagagaatccccagggagatttccagtacgcgccacaccgcggccataaacgccccgtccggatgcgccagcgccggtaaaccgaccatggccgccgtgtagcccgccagcacgaatccataggcgcgaaagttgcggttgcgcgtcgcgccagcggtgcagataccgacccagatggccagcgcgccaaggaacaattcagtgttttgcgcaaacaaggcgatcaaaaacaccatcaccgccgatccggccagagtgccgaggaagcgataaaaactcttggcgaacacctggccgctctggggctgcatcacgataaagacggtgatcatcgccgtgcgtggctgcggcagctccaggcgcatggccagccacaacgtgaggaacgcggcggtcagcaccttgaagatatacacccaggtcacgccgtcgctgcgtgcccagtcgaaaaagccacggcgccactcaagggagtagagccaccgcagcggtgcaggcaagggagtcatcgaaacctgctcagtgatcaaacacggccagcgccgccggggttttgctcggaagggttttggcgtcttgtggggcgtctttaccggcgccgaggccgccgcccagggcggtgaccagttcagcgtgggcactcaatcgcgcggcctgcacttgttgctcgatttgctgctgatggaacagcagcgtctgggcgttcagcacattgaggtaatcggtgaggccgcgctgataggcgatcatcgcgatgtcataggttttttgcgccgaggccacggactgcgcggcgaaggctgactgtttgtccatggattcgcggcggatcaactggtcgctgatgcccttgagcgcattgaccagcgtctggttgtaacgggccacggcgatgtcataacccgcgctggcctcgcccagttctgcacgcaaacggccgccgtcgaagatcggcaaggtgatcgccggccccacggtgtagttgaatttcttgcccgccagaaactccagcatgccaccgccggtggccatgtagccgaggctgccgaccagatcgacgttggggtagaaaccggcatgggccacatcaatgccacgggcttgcgccgcgacctgccagcggctggcgaccacgtcggggcgctggccgagcaactgcgcgggcaagctcgacggcaatttcagcggtgctgcgagggacaggctcggtcgttgcagctgcgcgccctcccccgggcctttgccggccaatgccgcgagctggttacgggtcagggcgatttcctcgtcgacagcgtccagttggcggtgggtttccggcaacggagtttcggcctggctgacatcgaagtgcgtgccgatcccggcgttcaggcgtttgttggccaggtccaggatctgctgttgctgggccagggtggcggcaacgatgtcgcggttggcgtagtgcaacgacagctgaatgtaggcgcgcaccacgttgttttgcagttcgagctgggcctggcgcgcttcggcggcgctcatgtgggcaaggtccacggcgcgctcggtggtgctactttcacgcccccagagatcgagggcgtagctcaggcccagtgacgcattgttgtcccaggtgttggcaccgctcagttcgccagggccgtaaaactgatctttcggccagctgtggcgcttgagggtggtgtcactgttgatctgcaacgactcagccgactcggcaaccccggccagggcccgcgcctggcgcacgcgcgcggcggccatggccaggctcgggctgttttgcgtggcgagctcgacccagcggttcagttgcgggtcgctgtaggcctgccaccattgcgcggtgggccagtgggcgtctctggcggcgctctgaatcgcttcgtcggtggccagttggttggcgttgagggcctggccctggggggctatccctgcggttccgatgcagccgctgatggctaacgatagagcccaaacactgagagtcttcagctctctgctgatgcgacgcggcacggcaagcgaattcctgagagggtgatgcgagaaaggtggcgcaattctaggcggcgccatggaggacgataagctggcattcctgtgaatctttgttaccgttcaggcgataatccgttggtagggatcactggaaggcgtaactttctgtcacaatttgttatctcccctgagaacactccatggacactttgcaaaacatgcgcgccttcagttgcgtggccgaagccggcagcttcaccgccgccgccgtgcaactggacaccaccacggccaacgtctcgcgcgcggtctccaacctggaggcccacctgcaaacccgcttgctcaaccgcactacccgccgtatcgcgctgaccgaggccggcaagcgctatttgctgcgctgcgaacagatcctggcctacgtcgaggaagccgaggccgaagccagcgatgcccatgcgcgcccggccgggcagttgaaagtgcacaccatgaccggcatcggccagcatttcgtgatcgacgcgattgcccgctaccgccgcacccaccctgacgtgacctttgacctgaccctggccaaccgcgtgccagacctgcttgacgagggctacgacgtgtccatcgtgctggccagcgagttgccggattcgggatttgtctcccagcgtttgggcatcacctacagcatcgcctgcgcctcaccggattacgtaaaagccaaaggctgcgcacagcgcccgcaggacctgctcaaccacgcctgcctgcgcctggtgagccccgtgatccagctggataaatggaccttcaacggccccgaaggccaggaaagcgtggcgatcaacacctcgccgtttttggtcaactcggctgacgcgatgaaaacggcgatcaccagcggcatgggcgtcggcctgctgcccgtgtatgcggccatcgaaggcctgcgcaatggcaccctggtacgggtgatgccgacttatcgctcgcaagagctgaacctgtacgccatctacccgtcacgccaatacctggacgcgaagatcaagacgtgggtggaatacttgcgcggttcgttgccggagattctggccgcgcatcaggcggagttggcggcatatgagttgagtggcggcttgggcggcactcggctggcgaactgattttatccggcaaccgagttcaaatgtgggagctggcttgcctgcgatagcatcaactcggtgtgcctgatacaccgagttgcctgcatcgcaggcaagccagctcccacattttgtcccctgcctacttcagctgagctatgttagcttgcttggcattctcccgtagtcgatgagcccgcctgccatgaaaaagactgtcctcgccttcagccgtgtcaccccgcaaatgatcgaacgcctgcaacaggatttcgaggtgatttcgcccgaccccaagcgcggtgacatcaatgcccagttcaatgaagccctgccccatgcccacggtttgatcggagtgggccgcaagctcggccgcgcgcagctcgaaggggcgagcaaactggaagtggtctccagcgtgtcggtgggttacgacaactacgatgtgccgtacttcaacgagcgcggcatcatgctcaccaacaccccggacgtactcaccgaaagcaccgccgacctggccttcgccctgttgatgagcagcgcacgccgggtggccgagctggacgcctggaccaaggccggccagtggaaagccagtgtcggcgcgcccttgtttggttgcgatgtacacggcaagacgctcggcatcgtcggcatgggcaatatcggcgccgccgtggcacggcgtggccgcctgggtttcaacatgccgattctgtacagcggcaacagccgcaagactgagctggaacaggaactcggcgcgcaatttcgcagcctggaccagttgctggccgaggcggactttgtgtgcctggtagtaccgctgagtgagaaaacccgccacctgatcagcacccgcgagctggggctgatgaagcccggtgcgatcctgatcaacatttcccgtggcccggtggtggacgagccggcgctgatcgaagccctgcaaaccgggcgtattcgcggcgccgggctggatgtgtatgagcaggagccgttggccgagtcgccattgttccaactgagcaatgccgtgaccttgccgcacatcggctcggcaacgcatgagacgcgcgaagccatggccaaccgcgccctggagaacctgcgcagcgccttgttgggccagcgcccgcaggacctggtgaacccgcaggtctggaagggctgacacgttcccctgtgggagctggcttgcctgcgatagcatcacctcggtgcaactgccagaccgaggcgcttgcatcgcaggcaagccagctcccacacaagccaagcccgacacaaaaccctgttaaagcctggcgccctcaagtcgataaccttccatagatgtcatccctgatccacagaaggtttttatgtccaccaccaaagcccgcgcagattcactctcgcttctgctctttaccttgcgcagcggcaagttgatggcgatcaacctgttgaaagtcagtgaaatcatcccctgcccgccgctgaccaagctgcccgagtcgcacccgcacgtcaaaggcatcgccaccctgcgcggcgcttcgctgtcggtgatcgacctgagccgtgccctgggtgaaatgcccctgcaggaccccaacggcggctgcctgatcgtcaccgacgtcagccgctccaagcagggtttgcatgtacaggcggtgagcaagatcgtgcactgcctgaccaccgatatccgtccgccgccttatggttcgggcggcagccgcgcgtttatcaccggtgtgacccaggtcgaaggtggcctggtgcaagtactggacatcgagaaagtcattcacggcatcgccccggcaccgattgaaacggcgcccactgacttgaccatggaagaagctgaagtgctgggcaacgcgcgaatcctggtggtggacgacagccaggtagcgttgcaacaatcggtgcacaccttgcgcaacctcgggctgacctgccacaccgcccgcagtgccaaggaagcgattgatgtattgcttgagctgcaaggcaccgctgaacagatcaacgtggtggtgtcggacatcgaaatgtccgaaatggatggctatgccctcacccgcacgctgcgtgaaaccccggatttccagcacctctatgtgttgctgcacacctcactggacagtgcgatgaacagcgaaaaagcccgcctggccggggccgacgcggtgctcacgaagttctcgtcgcccgaactgaccaagtgcctggtcgtcgccgcccaaaccgtagcgcaaaagggtctgtaagcgttggccgagtatttccagctactgcgtcgcgacctcaccggcagcctgcccgcgccgcagtggccagcgaacatccggctcgaccactaccgcaacgagctggccccggcgattcacgcggtgctggccttgacccaggaccagggcggcggccgtgtcgcaagcctggatgaatggcgccagcagtttgtcaccgatgcagagttcgaccccaggctgtgcctggtcgccagtgacgccagcggtatcctcggcgtggcccaatgctggaccagcgcttttatcaagaacctctccatccacccctgcgcccagggccagggattgggccgtgccttgctgctgcacacgttccaggtgttcaaacagcgcggcgagccttgtgtggacctcaaggtgcgcgaaagcaacctgcgcgcccggcacctgtatgaaagcgcgggcatgctgtttgtgctgcgtgacctggtccccgaagactgacaggcactggcgcataacttgcttccagagatcccgagtggtgaacagaggtaaaaacccgtcaccgctcatgagcgccctctgaccttgcctggtgacagatcctccatgaacactcacttttcctgcgtaggctgcggcaaatgctgctccgaccaccacgtgcccctgaccctcgcagaagcccgacaatgggcgacggacggcggtaatgtcatcgttttgatcgaaggtttcctcgccagcggcctgggtttacccgagcaacaacgcgaacacgccgagcgccggtcggtgatagtgcccagcggcaatatcgaggcgtttgtggcaatcacctttgccgcttacaacgccgggcgttgccgcaatcttgacgcagacaaccgttgcggcatttatgagcgccgcccgctggtgtgtcgcatctacccgatggagatcaacccgcatatcccgctcaaccctggcgccaaggactgcccgccggaatcctgggaacagggcccggcattgatcgttggcggcgagttgatggacacggagttggccgaacttatccgccgttcgcgccaggccgaccgcgacgatgtgcagaccaaggaagcggtgtgcgccctgctcggcattcacaccacggcgctcaagggcgacgggtttactgcctacctgccggacatgcatgcctttgcccaggccatcgagctggcgagtgctcagccgaccatggccaatgagtgggtgtttcatgtgtcgggaatggacattgccgagcaagtgcttggcgccggcgcccggatcgcaacccaagtgccggccaactacgcgtttattccattgcgggcgtcttaggtctacgcgcgattgcccctcacagacccgaaggcggctcatcgaggttatagggctgcaggattcgctcgtattcgccgctctgcatcagctgttccagcgcccggttaagctcagtgcgcaagccggtatcgggcttgcgcactgcgatggccacgccgtcgcccaacagttcggctgaaacggcggggcccaggaagccgaaatcctggccgctggctgtgtccagcagcgccctgcggatttccaccgagccttgcagcgtcgcatcgatcttgcccgccaccaggcagcgcagcagttcgtcattgagccagaagctcttgacgatgacgcccgccggcgcccatttcgagttaacgaacgcctcgcgattacttcccaagagtacacccacccgtttgcctttaagcgaacgtgccgtgggcaacaaacctgaagtcttgcgagccaccagccgggtggtgaacggatagagcgtgtcggtgaaactcacccattgacgccgcgcggaggtaggggcaatccccatgatcgcgtcgaactggcgcgcctccagcgccgcaaagttttcgacgagcacctgatcgacccaggtgcaacgcacgttgagttgttggcacagggcgttgcccagctcgatattcaaccccaccagttgcccctgctgattgcggctctggaagggaggaaattgcgcggcgacggcaaaacgaatttcaccacgcggcggttccaccaccgctgcgacgtccagcgaaagcagcagggcaaatactgcacaaaggcgtatcagggtcacgcaagcacgtcctttttccggaaagatcagcctgaccacgcctcgatgaacaatcatcagggcgaaggaaaggctgtgcagctttcaagaagcggacgtggacctacaagtcgaaaattcagcaggcgttgtaggcagaggccgacattgtgcgccgacggttagcctcagcgtttacccatcgaacggcgagtgcccggtggggccatgcctggagtcttggtatggccgtttttcgcaccgcctttgtaccaaggctggccagcgttcttggccccggccagttcacccggcttgaacggaaacttgaacgccgggatctcggctttttcaacgctttcagcgctggccggatcgacgaggtcggccgcttcaacgggggattgtgtcggggaagtcatgaaagctccggggcgtgcaaaaaatgaggcgcggccggcttgcggaccacacaggtgcgcagtatacctgcgcccttcagatctttaaccaccgcttgtaggaacagctggactttactgacagcgccgtcagatagcggtcactgtgctgaccggatcggcacgctataaagagcctccatccttccaccccttgcccggcgcctcacccatgcttattcaacgaaaaaccgttctgatcgtgggagccctcgtggtactggcggttacagcctgggcgctgacccgcccggcgaaagccaaactgactgtgccgacggcagtcccggtgagggtggtaagcgtcacgcagcaggacattccgcggtttgtcagcggcatcggttcggtactgtcgttgcatagcgtggtaatccgcccgcaaatcgacggcatccttaccaagctgctggtcaaggaaggccaactggtcaaggccggggacctgctggcgaccatcgatgaccgctcgatccgcgccagcctcgaccaggccagggcgcaactgggcgaaagccaggcgcagttgcaagtggcgctggtcaacctcaagcgctacaaggaactgagcatcgacgatggcgtgtcaaagcagacctatgaccagcaacaagcgctggtcaaccagctcaaggccactgcgcagggcaatcaggccgcgatcgactcggcccaagtgcaactttcctacacccagatccgctctcccgtcaccggccgtgtcggtattcgcagcgtggatgaaggcaacttcctgcgcatgagcgacacccagggtctgttctcggtcacccagatcgacccgatcgccgtcgagttctccctgccccagcaaatgctgccgaccctgcaaggcctgatcgccgcgcctgatcgcgccagcgtcgatgcctaccagggcgccgacacggatggccagaccggcgacctgctcggcgaaggccacttgagcctgatcgacaaccagatcagctccaccaccggcaccctgcgcgccaaggctgaattcaacaatgcctcgcaacgcctgtggccggggcaactggtgaccatcaagatccagaccgccctcgataaaaacgcactcactgtgccgccaaccgtggtgcaacgcgggctcgactcgcacttcgtgtaccgggtcaatggcgacaaggtcgagatcgtgccggtgcaggtcgcttatcaggacagcgatgtgaacatcatcaagggcgtgaacgccggtgacgtgctggtcagcgacggccagtcgcggctcaaggccggcgcccaggtggaagtgctcaaggagccgccgcaagtcatccagaccgtcgatgccaaggtgcagccatgagcggcagtcgttcgccatccgcctggtgtgttgatcacccggtcgccaccctgctgctgaccttcgccctggtgctgctaggggtgattgccttcccgcgcctgtccgtcgccccactgccggaagcggaatttccgacgattcaggtcaccgccaccctgcccggcgccagcccggacaccatggcttcgtcggtggccacgccattggaggtgcaattcagcgccattccgggcatgacccagatgacctccagcagcgccctgggctcaagcctgctgaccctgcaatttaccctcaacaaaagcatcgacaccgcggcgcaggaagtgcaggcggcgatcaacaccgcgtcgggcaaactgcccagcgacatgccgagcctgccgacctggaagaaggtcaacccggccgacagcccggtgctgatcctcagtgtcagctccgacaccatgcccagcaccgagctgagcgactacgtggaaaccctgctggcgcgccagatcagccagatcgacggcgtgggtcagatcaacatcaccggccagcagcgcccggccattcgcgtacaggcttcgccggacaaactcgccgccattggcctgacactcgccgacgtgcgtgtggccatccagcaatccagcctgaacctggctaaaggcgcgatttacggtgagaacagcgtgtcgaccctgtcgaccaacgaccagctgtttcacccggacgactacggccagttgattgtttcctacaagaatggcgccccggttcaactgcgcgatatcgccaaagtcatcaatggttcggaaaacgcctacgtgcaggcctggtccggcgacactcctggcgtcaacctggtgatttcacgccagcccggcgcgaacatcgtcgagaccgtagaccgcattcaggccgagctgccgcgcctggagggcatgctgcccgcgtcggtgaaagtcagcgtgttgaccgaccgcaccaagaccatccgcgcctcgctgcatgaagtggaagtgaccctgctgatcgcgatcttgctggtggtggcggtaatggcgctgttcctgcgccagctgtcggcgacgatgattgtgtccagcgtactcggcgtgtcgctggtggccagttttgcgctgatgtacctgctgggtttcagcctgaacaacctgacgctggtggcgatcgtgatcgccgtgggttttgtggtggacgacgccatcgtggtggtggagaacattcaccgccatctggaagcagggctcgacaaacgcgaggcggcgatcaagggctccggcgagatcggtttcaccgtggtgtccatcagcttctcgctggtggcggcgtttattccgctgctgttcatgggcggcgtggtcgggcggctgttcaaggaatttgcgctgacagccacgtcgaccatcctgatttcggtggtggtctcgctgaccctggcaccgacgctggcggccctgttcatgcgtgcccccactcatcacgcccacgataaacccggcttcagcgagcgcctgctcgccggctacgcgcgcaacctgcgccgcgccctggcccatcaacgcactatggccgccattttcggggtgacgctggcgctggccgtggtcggttacgtatttattcccaaaggtttctttccggtgcaagacaccggctttgtgctcggtaccagcgaagcggcggccgatgtgtcgtacccggacatggtcgccaagcacaaagccctggccgagatcatcaaggacgacccggcggtagaagcgttttcccattcggtgggcgtgaccggcagcaaccagaccatcgccaacggccgcttctggatcgccttgaaagaccggggtgatcgcgatgtgtccgccagccagttcatcgaccgcatccgcccgaaactggcgaaggtgcccggcatcgtgctgtacctgcgcgccggccaggacatcaacctcagctccggccccagccgcgcccagtatcaatacgtgctcaagagcaacgacggcccgacgctgaacacctggacccagcgcctgaccgaaaaactgcgcgccaacccggcgttccgcgacctgtccaacgacttgcaactgggcggcagcatcacccacatcagcatcgaccgccaggcggccgcgcgcttcggcctgaccgccaccgacgttgaccaggcgctgtatgacgccttcggccagcgccagatcaatgagtttcagaccgagatcaaccagtaccaggtggtgctggagctcgacagccagcaacgcggcaaagccgagagcctgaattacttttacctgcgctcgccgctgaccaatgagatggtgccactgtcggcgctggccaaggtcgacccgcccaccgtcggcccattgtccatcagccacgatggtatgttccccgccgccaacctgtcgttcaacctggcgcccggcgtggcactgggtgatgcggtgatcatgctcaaccaggcgaagaacgaaatcggcatgccggcgaccatgatcggcaccttccagggggccgcccaggcgttccagagctcgctggccagccagccctggctgatcctcgcggcgctggtggcggtctacattattctgggtgtgctgtatgagagttttgtgcacccgctgacgatcatctcgacgttgccgtcggcgggcctgggtgcgctgatcatgctgtggctgctgggccaggacttttcgatcatggcgttgatcggcctggtgttgctgatcggtatcgtgaagaaaaacggcattctgatgatcgacttcgcgctggaggcccagcgggtgcggggcttgccacccgaagaagcgatttatgaagcctgcgtcacgcggttccggccgatcatcatgaccaccctggctgcgttgctcggtgcggtgccgctgatgctcggctcgggccccggcgccgagctgcgccagccgctgggtatcgcagtcgtcggcgggctgctggtgagccaggcgctgacgctgttcaccacgccggtcatatacttgtaccttgagaagtttttccacaggcccaaaccagcgctggcgctggcgaccacacattgaggctaaggccccgtcctggaacaaaaggctcatgcgcgtcctgattattgaagatgaagaaaaaaccgcggattacctgcatcgcggcctgacggaacagggttacaccgtcgatgtagcccgcgaaggcgtcgaaggtttgcacctggcgctggagaacgattacgcggtgatcgtgctcgacgtgatgctgccgggcctcgacggctttggcgtgttgcgcgcgctgcgagcacgcaagcagacgccggtgatcatgctcaccgcgcgcgagcgtgtggaagaccgcatccgtggcctgcgtgaaggcgcggacgattacctaggcaagccattttccttcctggaactggtggcgcgcctgcaggccctgacccgccgcagcggcggccatgaaccggtgcaggtcaccgtggccgacctgtggatcgacctgatcagccgcaaggccagccgcaacggcgtgcgcctggacctgaccgccaaggagttttcgctgctcagcgtactggcgcgacgccagggcgaaatcctctccaagacggcgattgcggagatggtctgggacatcaatttcgacagcgacgccaacgtggtggaagtggcgatcaaacgcctgcgtgccaagctcgacgggccgttcgataccaagctgttgcacaccattcgcggcatgggttacgtgctggagaaccgcagtgtcggctaattccatcgccctgcgcctgagtggcatgttcaccctggtggcgctgctgatcttcgtgttgatcggtggtgccctctaccagcaagtggacaggggcctggggttgttgcccggcgccgaactggatgcgcgttacagcgtgctggagtcctcggtcaatcgcttcggcacgccggatcactgggcgaaaatcaccgccaagctcaagctgctcagcgaagaagaccagcgcatccggttctgggtggtgagcagcgatccgaactacgaatacggcaaccccgatgcccagatccgcgccttcgccgaaggccgcaccggcaagcgcgacctgcgcctggccgggcacaaacacccgttcaaggcgctggtcagccagttcccggcaaaggaccagcgcccgccgctgcgcttcatgatcgccatcgacaccgaaaacttccacgcgacgcagcaccagctgttgatggccctgatcggcctggcgtttgtcggtgtggtactggcggcgctgctcggcttctgggtgtcgcgcatcggtctcaaaccgctgggcaagctctcggatgaagcgcagaaactggcaccaccaaagctgtcggggcgcctgcaactgtcgcccctgccgccggagttgagccagttcgtcaactcgttcaactccacgctggatcgggtcgagcaggcctactcacgtctggagtccttcaacgccgacgtcgcccacgaactgcgctcgccactgaccaacctgattggccagacccaagtggcgctgacccgtgggcgttcagccgagcattatttcgaggtactgcaatcgaaccttgaagagctggagcgcttgcgctcgatcatcaacgacatgctgttcctcgccagcgcggaccaaggcagcaaggccaccaaactgatcgaaagctccctggccgacgaggtcgccaccaccctcgactacctggacttcatcctcgaagacgcccaggtcaacgtacgcgtacgcggcgacgccatggtgcacatcgaaaaagcccacctgcgccgcgcgctgatcaatctgctgagtaacgcggtgcagcacaccgcgccggggcggctgatcgaagtgaacattgaagcgcaggagcatcaggtatcgatcggtgtgaccaaccctggcgatgagattgccagtgaacacctgccacggttgtttgagcgtttctatcgggtggacgcatcgcgcagcaacagtggtgcgaaccacgggctggggctggccatcgtcaaggcgattgcgctcatgcatggcggggatgtgtttgtgcgcagtgaaggtggcggcaatacgtttggcattacattgcccgtctgatctcctcggaacaatgtgggagctggcttgtcgggccgccgcatcgctgcgatgcaggcacctcggtacatctgttgcaccgcagcgataccatcgcaggcaagccagctcccacataagccattccagctttagatctccggcatcctgactgttgctgtttgggcaacagtcattatcttgttacactctgtatcgcactgctcgcctgcgttactttgacgcaccgatgagcgcgacggcaacacaggttctgcgctcacccgaatttccctcgacttatttccagggctctacactgggaatctgtttaaagccgctgacttcagcggcttttttttgccgtaaaaaaggccaggcacaccccacgacactggctgttttcgattgaccaaaggagctccaccggtgaagaactcgctgacgttcaccccgttattcctcgcgattgcagcaacgatcgtccccctcgcccacgcggcaagcgcctccgccgccgacggtttcgtcgaaggctccagcctaaaaataaacacccgcaactactacatgaaccgcgaccgccgtgacattcacaccgacgacagcaaggaatggggccaagggtttctcggcacatttgaatccggttacacccagggcacagtcggtttcggcctggacgtgaacgccatgctcggcctcaagctcgacggcggtggcggcaccgacggctccagcatccttccctatggcagtggcaacggcaaagcgcccggctcgttctccaccgccggcggcacgttgaaaatgcgcgcgttcgacaccgaactgaaagccggtgacctgttcctcaacaacccggtaatcgctggcggcatgacccgcatgttgccgcagaccttccgtggcgtcagcctggccaatcacagcgtggagggctggatgatcgaaggcggccaggccagcttcaccaaactctataaccagagcggccaccgccgcatcggcaccagctacggtgcgttgccggaccacgccgacagccagcacctgaactgggccggcgtgtcgttcagcggcgttccgggcctgaccagcaacctgtacgcctcagaattgaaagacgtgtggcaccagtattactacgacctggactacacctacgcactccatgacttggtcagcctcaacccgggcctgcactactaccacaccagggacaccggccagtcactgctgggaaacatcgacaacaacacctacagcctgcatttcaccgtgggggtgggccatcacagcgtcaccgccgcctaccagcgggtcaacggcaacacgccgttcgactacatcacccagggcgacagcgtgtacctggacaattcccagcagtactcggacttcaacggcccgaacgaacgctcgtggaaactcaagtacgcctatgacttcgcaggcctgggcatgcccggcctgacctccgcggtttcgtacatcagcggcaagaccgacctgaccaaagtcgaccccaacagccggggctacagcgcctggtacagtgccgatggcaaagacgccaagcactgggagcgggatatcgacctgaaatacgtggtgcaaggcggcaaggccaaggatctggccgtacgcctgcaatgggcgaccaaccggggtggaaatggctattcggcggtagaccgggatgtggatgagtaccgtgtgatcgtggattacccgatcgacgtgttctaacgtcgctcatcccctgaaatacgctcaaaaaggtgggagctggcttgcctgtgatggcggtgctccaggtgcgggcccgtcgacgggtaaaacgctatcgcaggcaagccagctcccacactgaatctgcgtttgcctactaagctatgggcatcctcgaaacagaagtcagcacgatgagcccgagcctgcctcgccccacccgtcgcccggaacgcttgctgatcacaggcagcgtcctcacggtcctgctgatcgtagcggtcgtgacggccctgctgattcgcgaacacgccaataccctgcagaccgccaagcgcacagcgaacaacatcacccaactgatcgatgccgatgtgctgcgcaacgtcgagctctacgacatggcgctcaaaggcctgattgcggccacagagcgcaacgatctgcacagtgtctccgccagcatccgccacctggtgttgttcgaccgctccaccgccgcaccctacaagggcgacattttgctgctggacgcccatggcgaggtgatcgcagactcttcactgctcacgcccaagaccggaaacttcgccgaccgtgactattttcaggcccatcgcaccaaccccgacgtcggcttgtacatcagccgtccgttcatcgcgcgctgtgtgtgcgatgaccagtggcgaatcgcattcagccgccgggtgtccgcgcccgacgggcgtttccagggcgtcgcggtggcgtcgatgcgactctcgtactttcatcagttgttcagcggactgaatattggcagtaacagcaccatcaacctgatcaaccaacagggcatcctgctggcgcaagagccgatgctggagctggacatgatcgacaaagacctgagccagcgcccgaatgtggcccgcatgctcaaagagcatgatggcagctttcagggcgtctccagcgtcgatcgccagccacggctctacacgttctccaccgtcggcaacctgccgctgatcgtcgcagtggcgctgtctgccgatgaagtcttcgcccagtggaagcgtgctgccattctgatcagcctcgcgacgggcgtgctgtgcatcggcctgctgtggctgacctggatgctgagcaacgagttgcgccgccgtcaccgcgccgagcaggtgctgtcagaactggcagccaccgacgcgctgaccgggctggcaaaccgtcgcaccctggacgaacgctttcggctggagtgggaccgcgcccaacgttccaccgaaccgttgaccctgctgatgatcgatgtggaccacttcaaggccttcaatgacctgcatggccatcacggcggcgatgaggcattgcgcgcggttgcccaagtgatcgaagacaacatccgccgcccggctgacctggcggctcgctacggtggcgaagagtttgccgtggtgctcccacataccgacgccaaaggggcctgggtgattgccgagcatatccgcagcagtgtcgagcatttgccacgggtggccggtgcgcaagggcccattacggtgagtatcggcatgagcacgtggcaaaaacgcagccgcatgtcccttgaggatttgctgctcaatgctgatcaggcgctgtatgaagccaagcacagtgggcgcaatcgtatcgtcgatgctggaacagtgtgactgaggcagatgagcttttgtggtgagcgagcctgctcaccacaaaggtggctattacccatttaaaggcataaaaaaaggccacccgaaggtggcctttcaaaactaaagaaagagagttgttacttacaccgccgcaacgggacgcatgtaagagatcggtgcggtgctggcatcttcgaaggtcacgacttcccaagcgtctgtctgctcaatcaacttgcgcagcagctggttgttaagggcgtggcccgacttgaagcctttgaactcgcctatcaggctattgcccagcaggtagaggtcaccgattgcatcgaggatcttgtgcttcacgaactcgtcttcgtagcgaagaccgtcttcgttcagtacaccatccgcgtcgaccacaatggcgttttcaacgctgccgccgagtgcgaggttgtgcttgcgcaggtactcgatgtcactcatgaaaccaaaagtacgggcgcggctgacttcttttacgaacgaagtgctggaaaaatccacgcttgcactttgggtgcggtcacggaataccgggtgatcgaaatcgatctcaaagctcactttaaagccttcgaacgggacgaaggtggcgcgcttgtcgccgtcttctactgtcacttcccgcagaatgcgaatgaacttcttggctgcgtcctgttcttccaggccggcagattgaatcaagaatacgaagggtccagcgctgccatccatgatcgggacttcggacgcggagagctcgacgtaggcgttatcgatgcccagaccggccatggccgagagcaagtgctccaccgtgtccactttgacgtcaccgttgaccaacgtggtcgacatcgtggtttcgccaacattttccgcgcgagcaggaatctgcaccacagggtccaggtcggcacgaacaaacacgatgccggtgtcgacaggtgcgggcttgagggtcaggtataccttctccccggagtgcagacctacacctgtggcacggataatattcttcagggtgcgttgtttaatcatggcttggaccgcttcagcgcaaattgcgaactggtatcaacaaaggctggcgataataacagaccagacctttgctgaacaccaatcaccttcatagccctgatacattccattaatcggcctgacgacgcaggaatgccgggatgtccaggtagtccagatcatcttgcggattcaggctacgggacgccgcagcaccggcctgagcctggttgcgcatcacggtcggacggtccaggtcacggtagttcaccgacggcagttcctgacgcgcaggcgctggagcggcagcttgctggctggcgtgactgttgtggccggtgtgaacggtattgtcgatgaccttcacaggcttctcgattttagcgcccaggccggtagcaaccacggtcacgtgcagttcatcacgcatgtccggatcaataacggtaccgactttgaccatcgcgtgctcggaagcgaaggcttcgatgatgctacccacgtcggagtactcacccagggacaggtcaggaccggcggtgatgttcaccaggatgccgcgtgcaccttgcaggttcacgtcttcgagcaacgggttgcgaatggccgcttcagtggcttcgcgtgcacggttcggaccgctggcgcagccggtgcccatcatcgccatgcccatttcgctcatcacggtacgtacgtcggcaaagtcgacgttgatcatgcccgggcgcttgatgatgtcggagataccgcgaacggcaccggccagcacatcgtcagccttggcgaacgcggacagcaggcttgcgtccttgcccaggatggtcagcagcttctcgttgggaatggtgatcaacgagtcgacgctttcagacagcagacggatgccttcgtcggcgatctgcatgcgcttgcgaccttcgaacgggaacggacgcgtcacgacagcaaccgtcagaatgcccatttccttggccacttcggcaatgatcggggctgcaccggtaccggtaccgccgcccatgcccgtggtgatgaacaccatgttggtgccttgcagcacttcagcaatacgctcgcggtcttccagtgcggcttgacggccgacttccgggttggcgccagcgccgaggcctttggtcaccgcagtgcccaattgcaggatggtccgcgcgccgatgcttttcagcgcctgggcatcagtgttggcgcaaatgaattcaacgccttcaatgttgctcttgaccatatggttgacagcgttgccgccgccaccgccgacaccgattactttgataaccgggcttgcggggatgttgtctacgagttcgaacatgttccctctcctttcgttttctctagttttttcgcctactgcttgctgcggtgttgcggtaaatctttagaaattgccttttacccaagcttgcaaccgctcgaacaacggtgctttcgcgtcgtcgtcgttattgcggtagctgtcacggatgctcgggcccgacagggaaatgccgtcggtctgcttttgcagcccgtacaacagcaagcccacaccggtggaataaatcgggttgcgcaccacgtcgcccaggcctttgacgccatggggcacgcccaggcgaaccggcatgtggaagatttcctcggccagttcgaccgcgccttccatcttcgacgtgccgccggtcagcacgatgccggccgggatcaaatcttcgtagccgctgcggcgcagttcagcctggatcagggtgaacagttcgtcgtagcgcggctcgaccacttcggccagggcctgacgcgacagttcgcgcggtggacgatcgcccacgcttggcactttgatggtttcaccggcaccggccagtttggccagggcgcaggcataacggatcttgatttcttcggcgtactgggtgggtgtacgcagcgccatggcgatgtcgttggtgacctggtcgccggcaatcgggatcacggcggtgtgacggatcgcgccctcggtgaagatcgcgatgtcggtggtgccaccgccgatgtcgaccaggcacacgcccagctctttttcgtcgtcggtcagtaccgagtaggccgaggccagctgctcgagaatgatgtcgtcgatttccaggccgcagcggcgcacgcacttttcaatgttctgtgcggcattgacggcgcaggtcaccacgtgaaccttggcttccagacgtacgcccgacatgcccagcggctcacgcacgccttcctggttgtcgatcacgtagtcctgaggcagcgtgtgcagcacgcgctggtcagccgggatcgccacggcctgggcggcgtcaaggacccgctcaaggtcggcggcgctgacttcacggtcgcggatcgccacgatgccgtgggagttcaggctgcggatatggttacccgccacgccgacgaacgccgagtgaatccggcaaccggccatcagctgcgcttcttcgatggcgcgctggatcgattgcacggtggactcgatgttcaccaccacgcccttcttcaggccccgggacggatgcgtgccgataccgacgatttcgatcacaccgtcttccccgacctcgccgaccagcgccaccactttggaggtgccgatatcgagaccgacgatcattttgccgctttgcacgtttgccatgggtcctgcctcttcttaattcttcgcgacagcgggtttggctgtcgtcggcgcagccggttcacgccagccgacggccaggccgttggcgtaacgcaggtcgacgctcgcaatgttcgtaatctgttctttcaaggtcttttcatagatggcaataaagcggcgcatcttttccaccaggttgccgcgtcccagcaacaactcgatacccgggccggaactgcctgccccggtcgtcaaaaaccagctgccgcgctcacgcaattccagccgcgcgatcgagaaacccaacggccgcagcatctggctcaacgcctggtactgctgcatcacttgctgttgcgcgcgctgcggcccgaacaactgcggcaggtgctcatagttcgccagctcacgcggcgtgaacgcctggccctggttgttcaacagcgcgccatcaccccaacgggccacgggcagttgctcttccaggcggatcgtcacctggtccggccatacacggcgcacttccgcgtgggcgatccatggcatctgctccagctccgagcgcatacccgccaggtcgatggtgaagaagctcgccgccaggtatggcccgatgcgctgctgtaccgcttgctggctgatgtagctcaggtcgccctgcacgctgatcttggtgatcggccggtcggcatacggcaacagacgctgtgcgccttcataagtgccgaaacccaacgccaccagcagcaccggccagaacaacgccttgataaaaccaaaattggctttcggcaggcgcgccgacatcggctctttagccaccatccggctggcaccccgtggcaccggcttgcggctcggtgcttgtgggggctgatgacgaagcgatgcgccgttcatgtgcttagcctcttggctcaatgctggctgccaggatcgccagcactaactgctggaaatcgagaccggcggcacgagcagccatgggtaccaggctgtggtcggtcatgccgggagcggtgttgacttccaggaaccagaaattcccttggccatcctgcatcacgtctgcccgcgcccaaccggcgatacccagcgcctcacaggctttcgccgtgaggtccatcaattcctgttccttggttgcatcgaggccacacgggatccggtactgggtatcggaagccacgtacttggcgtcgtagtcataaaaggtgtggggcgtacccaatgcgataggcggcaaaacctgaccacgcagggtggcgatggtgtactcgggaccggaaatccactgttccaccaacacttgcgaatcgtaggtacttgccgctttccatgcgtcgatcaattcggcggccgagttcactttggccatgccgatactggagccttcatgggcaggtttgacgatcaaaggcaggcccagttcctcggctgcagaaatacaatcgtcttcgctgcacagcacgctgtgacgcggcgttggaatacccaggctgtgccagacctgtttggtgcgcaacttgtccatggccagtgccgacgcgaggatcccgctgccggtgtaaggaatacctgcgcactccagcaagccttgcatgctgccgtcttcaccgccacggccgtgaagaatgatgaaggcgcggtcgatcttctcggcctgcaaacgggccaggaaatcatcgcccacatcaatgccgaaggcgttcacgccagcgctttgcagggcttcgagcacggcattgccggacttgagcgacacttcgcgctcagcgcttttgccgccgaacagcacagctacgcggccaaagtcggcgggtgcgatgttcgaaaacagggagccgtagtcagtggtcatttcgacttcccctgttcggcagcggcaaacagcgggcttgccagcaatttaggcgcgagcccaccaatgtcaccggcgccctggcacagcagaatgtcgccggcacgcagcagcggcttgacgataggggccaggtccacaccacgctcgatgtagatcgggtccaactggccacgctggcgaatgctgttgcacagcttgcggctgtcggcccccgggatcggctcttcaccggccgggtagacttccatcagcagcagcacgttggcatcggccaatacattcacaaaatcgtcgtacaggtcgcgggtgcggctgtagcggtgcggctggtagaccatcaccaggcggcgctccggccagccaccgcgcacggccttgatcacggcggcgacttcggtcgggtggtgaccgtaatcgtctaccagcatcacatcgccgccttctaccggcagctggccgtagacctggaagcgacggcccacgccggcgaagcacgacaagccttcgacgatggcttcatcgctgacgccttcatcggaagcgatgcagatggtcgccagggaattcaagacgttgtggttgcccggcatgttcaccgaaacatccagcggctcgcggtcagggcgcagcacggtgaagaaggtctgcatgccttcctggcgcacattgatcgcgcgcacgtcggcgtcttcgctgaagccgtaggtcacggtcggacgcttgaccgagggcaggatttcacgcaccaccgggtcgtccaggcacaccaccgccaaaccgtagaacggcaggttgtgcaggaactcgacgaaggttttcttcagcttgttgaagtcaccgtcgtaggtcgccatgtggtcttcgtcgatgttggtgaccacagcgaccagtggttgcaggtgcaggaagctcgcatcactttcatcggcttcggcgatcaggtagcggctggtaccgagctgggcattggtgccggcggcattcaggcggccaccgatgacgaacgtcgggtccaggccaccggccgcgaacaccgaggcgatcaggctggtggtggtggttttgccgtgggtaccggcgacggcgatgccgtggcggtaacgcatcagctcggcgagcatttcggcacgcggtaccacgggaatgcgacgctcaagggccgtcgccacttccgggttggaggtgttcacggcgctggacacgaccagcacgtcagcttcggcggcgttctcggcgcggtggccgatgaagatctgtgcgccgaaggttttcaggcggtcggtcaccggcgactctttcaagtcggagccggacacttgatagcccaggttcagcaacacttcggcaatcccgcacatgcccacgccgccgataccgacgaagtggatgcgacggatgcggcgcatttccggttgcggcatggctttctgattctcaaccatgggccacctccaggcagatatcgaccacggtgcgggttgcgtcaggtttggccaggcggcttgcggtgctcgccatgctgttgagtcgttccggttgcatcaaaacctcggtcaggcgtgcggccaaatcggcggcgccagtcgttctttgcggcagcaggaaggcagcgccctccccggccaaatattcggcgttgcgggtctggtgatcgtcgatggcatggggcagaggcaccagcaaggacggcagaccggcggcggccagttcactgacagtcagcgcgccggagcggcagaccaccaggtcggcccagccataggcatgggccatgtctttgatgaagggctgtacgtttgcctcgacgccggcctcgcgataacgcgtagccgtgacttcaccgtggtgcttgccagcctgatgaaagatctccggacgcagttccaaaggaagttgcgccagcgcctccggcagcagtttgttcaacggctcggagcccaggctgccccccatgatcagcaggtgcgccttgcgcccggcgagtgcttcacgggcgatgtccataaacagttctgtgcgcaccgggttgccggtggtgcgcagcttgtcggattgcgcaaaggtcttcgggaaggcctcgcacacccgggcagccaacggcaccagcagacggttggcagtgccggcgacggcgttctgctcatgcacgatcaccggcacgcccgcgagcttggcggcaacaccgccagggccggtcacgtacccgccaaaaccgagcacacacaccggcttcaattcacggatgaccttgcgcgcttgccacacggccttgagcaacacaaatggcgctttgagcagggacaacttgcccttgccacgcaggccggtgacgttgatcaaatgcagcggcaaaccggcgttcgggaccaattcattttcgatgccgcgcggcgtaccgagccaatgcacgctgtaaccacggctctggaattcccgcgcacacgccagggccgggaacacatggcccccggtgccgcccgccatgatcagcacgttagcgcccatggttcggctcctcggcgaagtcgctttcgctgaattccatctcttcactgcccaagtgggttcgactctcccactcgatgcgcagcaacaagcccaggcacgcgcagcaaatcaccaacgaactgccgccataactgaggaacggcaaggtcagacccttggtcggcagcaggccgacgttcaccccgatgttgatcaggaactggccgatccacaggaacgacaagccgtacgccacatacgcggcgaaatactgtttggccttctcggcccacaagccgatgtacatgccgcgtacacacacgaacacgaacagcgcgacggtgcacaacgagccgaccacgccaagttcttcggcgagcaccgagaacacgaagtcggtgtgcgcttccggcaggtagaactgcttctgcacgctgttgcccaggcctacacccagccactcgccgcgaccgaaagcgatcagcgcctgggtcagttggtagccggagccgaactggtcggaccacgggtcggtaaaggtgatcagacgcgccatccgatagggttgcgcctgcaccagcaccgtcaccgcagcgacggccagcaccaccatcaaggtgaagcggaacaggccgacgccaccgaggaacaacatcgccgccgccgcccccatcatcacgacggtggcaccgaagtcgggctccatcagcagcaggccggccatcggcagcagcacgatgaagggcttgaagaagcccatccagctttcgcgcacttctttctggcgacgcaccaggtagccggcgaggtagatcaccacaaacactttggcgatttccgacggctgcacgttgaacgcaccgaagccgatccagcgcatcgaaccgttcacttcacggccgatgccggggaggatcaccatgatcagcaagccgaacgcaccgatcagcatcaaccaacccaggcgctgccaggtggcgatgggaatcatcatggtcacgatgcacgcaccgaggccgatcaccagatagaccaagtgacggatcatcatgtacagggtgttgcccgactgcacggcggccacttcggaagaagccgaagtgatcatcaccaggcccagaccgagcagcgccaggcaaccggcgagcatcgggaaatcaaggtcgataccgcgcccggtaatgatcggcgatgggtacggcttgatgatatttctgaaattcatgccaaggcctccacgccgcgggcgaacagctggccgcgctcttcgtagttcttgaacatgtcgaaactggcgcaggccggcgacagcagcactgaatcgccaggctgggccaatgccctgcactgggcgatggcgtcgtccagcgaggtcgcgcgcacttgcggcacaccgtcgcccagagcggcgccgatcaaaccggaatcgcggcccatcagcaccacggcgcggcaatgttcagccaccgggcctttgaggtctttaaagtctgcgcccttgccatcgccaccgacgatcaacaccagcttgccttcgatatcggcgcccaggccttcgatcgccgccagcgcggcaccaacgttggtcgccttggagtcgttgtagtagctgactccctcgagatcacgcacccattggcaacggtgctcaaggccggcgaacgtgcgcaggctcgacagcatcgcgtcgaacggcaggcccacggcatgccccagcgccagggcggccagggcattggactgattatgtgcgccacggattttcagttcgcgcaccggcatcaggttctggaattcgaaggccaggtatttctcgccgttctcttcgcgaatgccgaaggctttgaagtcaggtttgcccaggccaaaggtccagcagggcatgccttcacccatcagcggacggctcagggcgtcctggcggttgaccacaaattgcttggcgccacggaaaatccggtgcttggccaggtggtatgccggcaggccgctgtagcggtccatgtggtcttcgctgacgttcaacacggtggccacttcggcaccgaggtcgtgagtggtttccagctggaagctcgacaactccatcacgtacaactcgatgtcgtcgctgagcaggtccagcgccggggtgccgaggttgccgcccaccgcgacgcgcttgcccgccgcaacggccatctcaccgaccaacgtcgtcacggtgcttttcgcgttggaaccgctgatggccacgatgggcgccttcgcgttgcgcgcgaacaggtcgatgtcaccggacagcttcacgccacgggccgcggccgcttgcagggccggtgtcgcgagggccaggcccgggctcacgtagagctcgtcggcacggcaaagaaactcgacatccagctcgccacaacgcacttccacgtgcgggtagtcacggcgcagcgtgaccagctccggtggattttcccgcgtgtcagccacggcaaacgacgtgccccggttcgccaggaagcgaaccagggacatgccgctcttgccgaggccgacaacgatgcggaagtggtctgaagcgatcagggacactcgtttctacctcagtttcagggtggcaaggccgatcagcacgagaatcacggtgatgatccagaaacggacgatcacacgcggctcgggccagcccttgagttcaaagtggtggtgaatcggcgccatgcggaacacgcgacgcccggtcaatttgaaggaggccacctggatgaccaccgacagggtttccatcacgaacacaccgcccatgatgaacaacacgatttcctggcgaacgatcaccgcaatggtgcccagggccgcgcccagcgccagtgcgccgacgtcacccatgaagacttgtgccgggtaggtgttgaaccacaggaaccccaggccggcaccgatcagcgcgccgcagaacacaatcagttcacctgcgcccggtacgtaagggatcagcaggtattcggcgaatttcacgttacccgacaggtagcagaaaatgccgagcgcgccgcccaccatcacggtcggcatgatcgccaggccgtcgaggccgtcagtcaggttgaccgcgttgctggagccgacgatcacgaagtaggtcagcaccacgaaaccgatgcccagtggaatgctggcgtccttgagcattggaatgatcaaggtggtttccacggcacttggcgcggtggtgtagaggaagatcgctgcagcgaggccgaacaccgactgccagaaatacttccagcgacttggcagccccttggagtttttctcaataactttgcggtagtcatcgacccagccgatggcgccgaacagcaaggtcaccagcaacacggtccacacgtaacggttatgcaggtcggcccacagcaaggtgctgatgccgatggacgacaggatcaatgcaccgcccatggtcggggtgccggacttggacaggtgcgactgcgggccgtcattgcgaaccgattgaccaatttgcaggttctgcagggtgcgaatcatccacggccccaggaacagcgacaaacacaacgcagtcagcacacccaggatcccgcgcagggtcaggtactgaaagaccgcgaagcctttgtggaactgttgcagatactcagccagcagcagcagcattaatgtttctccgtacttgagccacacaaggccgcgacgacgttttccatcaccgcgctgcgcgatcccttgatcaaaatggttgtgtgtttgtcgtgttcagccgccgtcagcgcctggatcagctcggcctgggtggcgaaatgccgcgcaccggggccgaaagcgtcgacggcgtgcgccatgttcgggccgaccgcgtagagcgcgtcgaccttgccggcggcataggcgccgacttcacggtggccttgttcagcccagtcgcccaactcgccgatatcccccagcaccagcaccttgcgcccggcaaaggctttgagcaggtctactgcagcattgatggaggacgggttggcgttgtaggtatcgtcgatcacgcgcatgccgttggtggccagttgcgccacggtgcgccccttgaccggctgcaccgcgcccaaaccggtggcgataccgaacagcgacacgcccaaagcgtgcgcagcagcagcagcggccaaggcattggcgacgttgtggttgcccagcaggttcaactgcacgtgctcgctaccctgcggagtgtgcaatgtgaaagacgggcagccacgcgcatcgacggtgatgttcgaggcatgacaatcagcggccgcgttcagtacggcaaacgtcaggaccttgcgaccggcggcacgtacacgccaggtttcaaaagccttgtcatcaagattcagtacagcagtgcccgaagcatcgaggccttcaaggatttcgcccttggcctcgacgattttttccgggccgccgaattcaccgacgtgggcggtgccggcattgttgatgatcgccacgtgaggcttggtcagcgccacggtgtaggcaatttcgccgatgcgcgatgcgcccagttcgatcacggcggcggtgtgttccggggccagttcgagcagggtcagcggcgcgccgaaatcattgttcaggttgccacgggtggcgagcaccggcccgcgcgtgcgcagcacaccggcaagcagttccttgacggtggtcttgccgctggaaccggtgacggctgcaaccggcttgtcaaaggcggcgcggttcagcgcacccagttggccgagggccaggcgagtgtcagccaccaacagttgcggcaggctggactcggcgacttctcgctgcaccaaggcacccacggcgcctttggcggcaacgtcattcaggtagtcgtgaccatcaaaacgcgggcctgccagtgcgacaaacaactggcccggtttgatgttgcgactgtcgatactgacgccgtcgaagctgcaatcgctcgacactacgcgggccgacaggacctgggccagttcgctgaacttcatcgctttaagcatgggcaatctcccaggcggtcaaggcgtgatccgcctcgaccaagtcggagaaggcatgacgctcgccgttgatttcctggtaatcctcgtgccccttgccggccagcaccactacatcgtcggcactcgcgctggcgatcaattgggcgatggccgcgccgcgaccggcaacaaaggtcgctttggacgcgtctttgaagccgacacggatgtcgtcgaaaatctggcttgggtcttcggtgcgcgggttgtcatcggtgacgagtacgccatcggccaggcgctcgacgatttcggccatcagcgggcgcttgccgcgatcgcgatcaccgccgcagccgaacaggcacaacaacttgcccttggcgtgcgggcgcagggcgaccaatactttttcgagggcgtccggggtgtgggcgtaatcgaccactaccagcggctgtttgccgccacccaggcgctgcatgcgacccaccgggccttccagcttcggcagtacacgcaggatttcgtccagggcgtaatccagcccgagcagagcgccgatggcggccagggtgttgctcaagttgaaacgaccgagcaaggtgctgcgcaaatgatgttcgccctgaggcgtaaccagagtcgcgagcacgccttcgtcattgaagtgggcatcgcggcaatacaggtaagcgctcgcgtcttccaggctgtagctgatcaggcgcgattcacggtcttcggcggccaactggcgaccgaatgcgtcatccaggttcaccacgcggcatttgagatcgttccaggcaaacagcttggccttctcggcagcgtaggcctccatggtgccgtggtaatccaagtgatcacgcgacagattggtcatcaccgccacatcaaacgccagcgcagcaacgcgcccctgatgcaagccgtgggaagacacttccatggcaaccgccttggcaccggcctttttcaggtcggccaaggtcgcttgcacggcaatcgggtttggcgtggtgtgcaggccgctttgcaacgcaccatagaaaccagtgccaagcgtgccgacgatgccgcagtgctgacccagcaggtcaagggcctgggcgatcaattgggtcacgctggtcttgccgttggtaccggtgacgccgaccaggttgagctggcggctcgggtcgccataaaagcgcccggcgatatcggacagttgtgcagcgaggcctttgaccggaatcaagggtacgtcggtgattggcagtacggtggcgccttccacttcataagcgactgcggcggcgccgcgctgcagcgcatcagcaatgtgtgcacgaccatcatatttaccgccaggcactgccagaaacaggtcaccggcgcgcacattacggctgtccaggctcaactcacgaatcagcagatcgcgaccggcgtgggcaaaaatcttgttcaggctaagagacatcagccgcgccctccattggcttttacagcagcggccggtggtccggcgttcgcttgttgagtcggcggcaggttgtccggcgtgatgttcatcaggcgcagggtgccggacatcactttgctgaacaccggcgccgataccaggccaccgaagtagcccgctttactcggctcatcgatcactacgacgatggcgtagcgcgggtcgctcatcgggccgaaaccggcaaacagcgagcgataggagttttcggcgtagcccttggtacccaccgacgttttacgcgcagtacccgacttgccagcaacgtgataagccggcacctgggcacggaacacaccacgtggcgcttcgatcacttgttgcagcatgccctgcatggtcttggcgacgttttccgggatcacctgggtcgctttcggtgcttcgtcgacgtgaatcaggctcaagggaaccatgcggccgttgttggccaatacagagaaagcgtgggccagctggatcgcggtcaccgacaggccgtagccataggaaagcgtggcggtctcggcttttttccagtcgcggtagttcggcaggttgcctacgcgctcacccgggaagtccaggccggtgggttgcccaaggccgactttctgcgccaggtggtagatggtttcgccgccgatgtcgaaggcgaccttactcatgcccacgttactggagttgatcaggatacctgtcaaatccaataccggcccttcggtgcgggacacgtcacgaatggtgtatttgcccaactgcagcgtgcccgggtaaacctcgaccttgtcgctgggcttccagcgcccggtttccagggcagcactcatggagatggctttcatggtcgaacccggctcgaacacgtcgatcatcgcgcggttgcgcatcatcgccggctgcaggttgcgacggttgttcgggttgtaggtcggctggttgaccatggcgaggatttcaccggtcttcacgtccatgatcaccaggctgccggctttcgcgccgttctcgatgatcgcgttacgcagctcgcggttggccaggtactgcaggcgcaggtcaatcgacaacgccaagggcttaccggccttggcgtttttggtgacctggacatccttgatcagtctgccgcgccgatccttgatgacttggcgcttgccgggcaccccggccagccactcatcgtaggccagctctacaccttcgcgaccgtgatcatcgatgtcggtaaagcccaccatgtgcgcggtggtttcaccggcggggtagaaacgacgaaattcctcgatgccgtacacaccggggactttaaggtcgagcacttgctggccttgttcgggcgtcaggccgcgaaccaggtaaatgaattccttgttggcttgagcttcaaggcgctcagccaggcctttcgggtcctggcccaacgcagcggcgagctccggccatttttccttggcggtttgcagttccttggcgttggcccacagcgtggtcaccggcgtactgaccgccagaggttcgccgttacggtcggtgatcaggccacggtgcgcaggaatcggaatatgccgcaggctacgggcatcaccctggccgatcagaaagtcacggtcgaccacttgcaggtcgatgatccgccaggcaatcgcgccgaccatcaaggccagcaagccgagcatcaggcggaagcgccaagggtagagtgcgccttcaagtttcatcatggcgccaccatgcgaacgtcggccgcgcccgggatgtgcattttcagttgctcagtcgcgagcacttcgatgcggctgtgggccgtccaggtgctttgctcgaggatcaaccggccccattccgcctgcgctttgtcacgcacgctcaattccccgtacagggtattgagcaactggcggttgtagtgggcgctgtaggacaccgcaatcgcggacaccagcacgccgacaaacagcagcaacataaagaagctgccgcccgggaggggcttggcgaaaagcttgctcaccgcaacttctccgcgacgcgcatgacggcgctacgggaacgagggttggctttgagctcggcttcggaagcgaactgcgctttgccatggattttgattttcggcacaaaggcttcgaaacgtaccggcaggttgcgcggcaggttatcggattcgcccttgaccagacgacgcatgaacaatttgacgatgcggtcttcaagggaatggaagctgatcaccaccaggcgaccgcccacttccaaagcgtccagagcggcttcgagacccgcttccagatcgcccaattcgttgttgacgtgaatacgcagcccctggaacgcgcgggtcgcagggttcttgcccttttcccatgccgggttggcgactttcagcacttcagccaggtcggcggtgcgctcgaacggctggatttcgcggcgctcgaccacggcgcgagccatgcgaccggcaaagcgctcctcgccgtattctttgaacacgcgggtgatttcttcgtggggcgcggtggcgatgaactcggcggcgctgatgccccgggtaggatccatgcgcatgtcgagcgggccgtcgttcatgaaactgaagccacgctcagggtcgtcgagctgtggcgaagacacgcccaggtcgagcaaaaccccggccaccttgcctgccatgccgcgctcggcgacttcggcacccagctcggcaaagctgcgctgcacaacgacaaagcggccgtcttcggccgctagcgcttgcccggtggcaatcgcttgagggtctttgtcgaatccgagcagtttaccgtcggagccgagctggctgagtatcaaccggctgtgcccgcccctgccgaaggtgccatccaaatagcagccatccgcgcgtacggcgagagcctcaacggcttcgtcaagcagtacggtgatgtggttaaagccgctatcaatagtcacaggatcaaatcacgcagttcatcaggcatggcgcccggttgttgaatagcagccaggtccgctgcagacacagcatcccaggcatcttcgtcccacaattggaacttgttcagttggcctaccagcattgcgcgcttatccagcttggcgtactcgcgcagacgcggaggcaccaggaaacgaccgctgccatccaactcaaggtcgacggcattaccgatcagcaaacgctgcaggcggcggttctcttcacgcaacgaaggcagcgcgcgcaacttggtttcaatcaactcccactcatcgagggggtaaacacacaaacaaggatcaacggcatcaatcgtgatgattaactggcctgaactgcgcgaaacgagctcgtcacgataccggctcggcatggcgagacggccttttgcatcgagactgatagcgttagctccgcgaaacacagatgcgtttctccaaattttagcgttttacgttcaaaaaacccactttgtgccactttccgccacttgcgcacactataggaatgcgcccaccacaccgtcaaggcgcggattcaaggaaaagccttacagaacggagatttaggaacgtaaaaggaggagaaacgagagtttggcgctgtttttgactcaataaccgcagacagctcagagagctatagcttgaagttaaagtaatttattaagagtaagatttttttggtattacgaagatgcatctgccaatgattcggcagggagggattcttgcgttactaccgggtttctgcccgagattcagacagaaggaaaaaaggtggagagtcgatctgtaagccgggttctgtcttgaacagtcattcgtctacgatggccatcactggacatctttagcaacctacccggtcccagcgcgggccacgccttgggaccctatttggtcttgctccaagtggggtttacctagccacgaactgttgccagacgtgcggtgcgctcttaccgcaccttttcacccttaccggcaccgaagtgcttaggcggttattttctgtggcactttccgtaggctcacgcctcccaggcattacctggcacttcgccctatggagcccggactttcctcccccctctaattttcatagagggcagcgactgtccaatcgactctccgccgcgcaggttaacggcacggcggcctcaggacaagtattaaaagtacagcattgccatcacgttcagacggaataccggcttaaccccggaactattcgcctttctgtttatccagcgccacttgatacaacacatttttacgcaagccggtaatttccgcagccagggcggcggcacgcttgagtggcatttctttaagcaacaaatccaggatacgcatggcctcactgccgaccgcctcttcatcgaccggcgcagtccagccggccaccagtaccacacactcgccgcgctgctggttgctgtcgccctcgacaaacgcgcgcaggtcctccagcggcaggcccttgagcgtttcaaaggtcttggtcagctcgcgcgccagcaacgccaagcgttcgccaccgaacaccagctccatgtcttgcaggcattccagaatacggtgcggggcttcgtagaagatcaaggtgcgcggttcttccttcaaggcctgaagacgcgcgcggcggcccacagccttggccggcaggaaaccctcaaaaatgaaacggtctgagggcaggccggcggcggataatgccgcaatcagcgcgcacgcccccggaacaggcactacattgataccagcggcccgtgcctggcggaccaggtggtagccgggatcggaaatcaacggcgtgcccgcatcggagatcagcgccacatcatccccggccagcaagcgggtgataaaacgactgccctcttcgcgctcattgtgttcatggcacgcagccagtggcgtgctgataccaaaatgctgcatcaaccgttgggagtgccgagtgtcttctgctgcgatcaatttcacgtcgcgcaacactttcagcgcccgagcactgatgtcgtccaggttgccaatgggcgtcgccacgacaaaaagcgagcctgcagtggaattcaaaggacctggagcagtcaaaacgcacacctcgatggttaagaaaagtcgcattgtagcgcgtaggcgtctcgataatatgcccccgaggttgaccgtcggtgccagctcgcaacatttgcacgacctaaatcaacggtttcacgccactaacatcgcgcctgggccagtgcttgggtacacttccacgctaatttgttcggtatcaggaacgcttacatgatcgcttgcctgcggctgctctccgccctctgcctcgctgccttgttggccgcttgcgccagctcgccctcgtccagccttggcgaccttccacggactccggatgccagtatcgagcaattgctcgaacaggcgacttccgccagcacgccagaaaaggccgcactgctgcgcctgagtgcggctgacctggcgttccaccagaacaaccctggtcgctcgtcgcagattcttgcgcaggttccgctggacgtcttgaagccggcggcacaaatcttcgccagcaccctgtccgccgaattagccatggcgcgcaaccagcccaaggctgcgctggccgcgctgaaccatcccagcctgcaaagcctgaaagatctgccgactgaccagcagatccgtaccggcaccgtgcatgcccgcgcctatgaagccgatggccagaccctggccgcggctcgcgagcgtgttgcactggcccccctgctcagtggcgatgctgcgaagaacaaccacgaagcgatctggaccctgattgccgccctgccagccgaacagctgcaagccagtggcaacccgacactcgacggctggatcactctggcccaggcggtcaagggcgccggcaccctggagcaacagcaagccgccatcgatacctggcgcgcacaaaacccgggccaccctgctgcagtgaatctgccaaccccgctgaccaagctcaaggaactggccagccagcccctgaacaagattgccgtgctgctgccgcaagatggcccgttggcttcggtcggcaaggcactgcgtgaaggtttcatggccgctcacttccaggctgaacaagccgggcagaagccgccggtcattgagttcttcgacagctcgcgcctgacctctatcgacgacttctacgccaaggcccaggcggcaggcgtgcaactcgtcgtcggcccgctggagaagccgctggtcaaacagctggctgctcgtccgcaactgccgatcactacgctggcactcaactacagcgaaaccgatcagaacccaccgcaactgttccaatttggcctggccgctgaagacgaagcccgcgaagtctcgcgccgtgcccgcgccgacggcctgcatcgcgctgccgccatggtgccgcgtggcgaatggggtgagcgtgtctataaggccttccgccaggattgggaagccaatggcggcaccgtggtcggcgttgagtacgttgaccaacccgtcgccctcgcccaacagattgccgacctgttccagctgcgtaaaagtgaaggtcgcgccaagagcctgcaaagcaccgttggcactgacgtagccgcccagccatcgcgtcgccaggacatcgagttcatcttcctggccgtgccgccgcagttggcccagcagatcaaaccgaccctgaacttccagtacgccggcgatgtgcctgtgtatgcgacctcccacgtattcagcgccagcggcgacaagaaccagtacctggacatgaccaacgtcatgttctgcgaaaccccttggctgctcaacaccaccgacccgctgcgcaaccaggttgccgcacaatggccgcaagccaatggcagcctcggccgcctgtacgcgatgggcgtcgacgcctaccgcctggcgccgcgcctgggccaactcaaggcgctgccggatacccgcgttgacggcctgtcgggcagcctgggcatcaacgccaaccagcgcgttgaccgccaactgccgtgggcgaagttcgtcggcggcgatatccaacgcctgccggacaccccgcgctgatgcccgagcgctcccgcgcacaaagcggcaaggatgccgaacttcaagcgctttcgtacctgcaacaacagggtctgcgccttctggcgcagaactggttatgtaaacgcggcgagcttgatctggtcatgcttgacggcgatacagtagtattcgtcgaagtccgctacagaaaacacgcacaatggggtggcgcgctcgccagtatcgatgggcgcaagcgtcagaagctgatactcgccgcgcagtatttcctgcaaaaagagcatcgctgggctgacaacccctgccgtttcgatgtggttgccatagaaagcacaccgtctggcacagttgatctgaactggctcaaagatgccttcgacagctgattcaccggacatcttcaccacacacttttgctctttgcattgcgggctgcacattcctgtgccaatcagccgcgctacttaaggtcacacagatggacatgcaatcccgaattcgccagcttttccaggccagcatcgacaccaagcaacaggcgatggacgtacttgcaccgcacatcgagcaagccagtcaggtcatggtcaatgccttgctcaacgagggcaaaatgctttcgtgcggaaacggcggttcggccggtgatgcccagcacttctcctccgagttgctcaaccgcttcgagcgcgagcgcccgagcctgccggccatcgccctgacgaccgattcgtcgacgatcacctcgattgccaacgactacagctacaacgaaatcttctccaagcagatccgtgccctgggccaacccggcgacgtgttgctggcgatttccaccagtggcaactcggccaatattattcaagcgatccaggccgcacatgatcgcgaaatgattgtcgtagcattgaccgggcgtgacggcggcggcatggcttcattgttgctgccggaagacgtggaaatccgcgtcccggccaatgtcactgcacgcatccaggaagtccacctgctggcgatccactgcctgtgcgatctgatcgacagccaactgttcgggagtgaagaatgaccgttaaccgcctcagccttttggccatcacgctgtgccttgccatcagcggctgcagcacggcaatcactgcgacacgcgacacccccatccaggatgaccggggcacacgcactttcggcagcaccattgatgattcgctgatcgagaccaaggtgaaggtcaacgtcgccaaggcggctaccgacctgggcaatggtgcgtcgcgcattgtggtaaccagcttcaacggcgtggtcctgctggccgggcaaacgccgcgcgccgacctcaaggcccaggctgaacaagccgcctccacggttcagcgggtcaagaaagtccacaatgaactgcaagtcatggacccgatcaccctgctggccatcagcaacgatgcgttgctgaccaccaagatcaaagcgcagatgctcactgacagcgctgttcccggctcacgcatcaagatcgtcacagacaacggtatcgtctacatgatgggcctgctgactcaggcggaagccactcgcgcagccaacctggtacagggcgtgtccggcgtacagaagattgtgaaagtgttcgaatacatcgactgacataaacgtcggccacaaaaaaggcgccgtgcattgactgcacggcgccttttttatggccagcgtttattggtactgctggtacgggttgccctggaactggttgttctgctgcggcgcctgctgctgttgagcgccaggctggccgtattgctggccagggatcgggccgaggttcacctcaacacgacggttctgggcgcggccattcacgtcggcgttgctggcaatcgggttatccgggccggcaccgcgtgcgctcaggttggtcgggctcacgccttgggacgtcaggtagttcgcaacgctctgggcccggcgctgggacaggtccatgttcaactggcggctaccggtgctgtcggtataacccacaatctggatagtgttctggttgaactgcttgagcgatccggccaggttattcagcggcgtatagaagctgctggagatcgcgtccgagttggtggcgaaggtgatattacccggcatgatcagcttgatctgatcgccctggcgctgcacttcaaccccggtattggccatgctctcacgcagtttcttttcctgctggtcggcgtagtagccataacctgcggccccaaggcctgcaatagcaccaccgatcagtgcgcccttgccacggttgttgtggtcgatggcggcaccggcgagggcaccggccagcgcaccaagaccgccgtatttggcggttttgctgatgccgccttgcgaaccattatttgcctgcccctggctgccgtcgtaaggattaggcgaagcgcagccggataacagggctacggcggtggcaacaacaagaagacgacgcggagtgaacatgaagggagctcctacttttgcattctgtggtgcaaaggacattggcaatggacctgtgccgagtttggaacgcgacaaacggtaaaaattccgtgcccgctatccgccgctaaggaaaccgtagcagacgcaggctgaacgcgacctgcgtttttgctacttgaagaacagccctggcgccgaaattattcccttctcgctacgccctcacaaaaggattttcacgcatttcatcgcccaaccgggtatccggcccgtgaccggccaccaccgtcgcctcctcgtccagcgtgtacaaacgctgcttgatcgaacgcacaatcgtggcctggtccccgccccacaaatccgtacgcccgacaccgcgtcgaaacaacgtatcacccgcaatcagcagcttggcgtcggcgaaccagaaactcatcgacccaggtgtatgcccgggggtatgcaaggccacgccgcagccgcatgccaattcttcctcatcctccagccagcgatccggcgacggcactggcgtatagggcacacgaaacatctggcattgcatttccaggttatcccagaggaattgatcctccttgtgcaggtgcaacgtcgcgccggtcttcgccttcaactggccggacgccagaaagtgatccagatgggcatgggtatgaatgatgctcaccaccttgaggccaagtgcatcgaggcgcgccaggatcagttcgtgattgccgcccgggtcgaccacgatggcttttttggtgatcgggtcgccgatgatggtgcagttgcactgcaacgggccgacggggaaggtttcgcggatcaaggctgggggcagagacatcagggcgggctcggtgatgggcaatccagcaattttggcacagatcgtttagcccctaccccaacaagcccatttcctgcgcccgcgccaccgcctgggtgcgccgctccacccccaacttgctgttgatatggctcgcatgggttttgaccgtgtgcagggagatgaacagccggttgctgatttcttgattcgaacagccttgggcgattagttgcagcacggccagctcccgagcgctaaggctttcatgggcagatgaaggttctgccggtgcgaccgccggtaaaagtgccagcaggctctggttcaacaacccgtgcgggtccttgcccaactgctcacgcatccagcccgggtggttttccagcaagcgctgaaacggttgcaacgctccccccacaccggcttcgagggctctggcaaaaaccggccgggccttggtttcctggccacactccagcagcaaatgcgtctgttgggtcagggccatcaaggcaatcatctggcgaccgctgttctgcgcctgttgcgccagttcttcgagccgctccagcgccgccgcaggctgatgccgagtggcatccagcgcggcttgttgcaaaccgatatgttgcggcaggtgcggatgaaactccggcgcggccgccgcgtgctcaccgttgtaggtttgccccagccgggccagccaggcatcggccaggtcggtgcgaccttgggccagccacagttcgcatttgatcagcgtaatcatcgccaggtagtagatcggcggcacgtcccagatgtgcatcaagcgctcggcctcggcgagttcggcgaaggctttggggaaatcattgcggcgcccttcgaaattggcgatcacacaatgaccgatcaatacgctgatgtcgcgacaggcccgggcttcggtgagcccggcgcgcaaacgggcaaggccggcttccggctggcagcgcaccagcaacaaaaagccttcatacaacgacaaccgtgcgcgtactgcatacaaccgctgaggcgccagcccgtgcagacgctgctggccctggcggacctcgtccagggaacgcaaaatttccccccgcgcttgcagtacacgcgcccgatcgtaatgggccaaggcttcaaacagtgggttgccgacacgctgggccaattccagggattcgcgattcaaaccacgggcgcgccacaagtcagcatcgacgatggccaggttggataacgtcgacaggcacatcagccgttggccgtaacgtttttgcggcaggctttccagcgcctcgctgcaatagcgctgggtcagttcgcgatccccccggccccgggcgatgatcccgctcagcgccagccattgggccagcattgatttttgcgcggtggccgacggcgccggcagaaaacggctgagataactggacagttcctccgccgcatccagttgacacgccaagcccagcgcccagctgtagagcacgatcaaccgcggtgtgctgatcagcaggctgtcgggcaaatccatcttccagcgcagcaacatgccgatattctgctcggcgagcagttgctcctccgacaggttttgtaccaggtttgccgccacgtccagatggcccgcacgcaacgcctgctccaccgcttcgtcgatcaaaccctgcacgttgaaccagcggcaggcccgcaagtgcaggctggccagcggcaacgtggcattgctcgcgcggcgggtgcgcagcaagtcagaaaacaggtggtgatagcggaaccagtggccctgctcatccagtggcaccagaaagacctggtgcgactgcaggtaacgcaggatttccgcactgtcatgggcttcgcggacggcgtcgcacagctcactgcaaaaacgatcctggagcgcggtgtcgtatagaaacgcttgaacttcgatgggcaggcaatcgatcacctcttcgagcaggtaatcgcgaatcagcccttccccgccgtgcaggttttgcggcaaggcgccctcgttacccgcctcggaaacggccagcaaccaaaaccgcaaaccggcgacccagccttcactgcggcgaatcaagttatccagcgcctcgccgcgcaatgagttgctgtgccggtccagcacggccagggactcgtcgtgggtcaggcgcaagtcctgttcgtgcaactccagcaggtgccgcgacaggcgcagacgcgcgagatgccaatccgggcgttggcggctggtcaccagcaccaccaggccatcaggcaaatgattgaggaaaaactgcaggcagcgatccagcaccgggccctgggccagatggtagtcatccagcaccagtaacaatggcgtgcgcgtggacagatgttcggccaattcgtcgagcaaaccatcaagccactcttcaaaggcaaaaggctgatgacgctggcgcattttcagcaggcccagggattgggtgccgagctgtgggaaatattgctgcaaaccgtcgagcaggcgctcaaggaaacggcccgggtcattgtcgcgcgggctcaaacccagccacaggctgtgccagtgggctggcagcccctgacagaactcgacggccaacgaactcttgccaaaccctgccggagcgctgaccagcagcaaccgcccttccagccccgcactcagccgctcgcacaggcgcgggcgcagcacgtagccgtcaggcagcggtggcctgtagaaacgcgcttccagggtcggaatcaccgcgcttgcaggccctcggatgggggacagatcagtcatcgccgggctcttgtagaaggctgttgtcggcattgcagatgaccgcagactagcggtaaaagcggcgggattgtagatctttgcaacatttgcctgaaaaagaactgcgacaaaaaatatcccagcgtccaccccaaacaaaatgtgggaggaagccagtgtgggagctggcttgcccgcgatgctgtcacctcggtctgtcagacctaccgaggtgaggctatcgcaggcaagccagctcccacactgactgcctcccacatggggtttatgcgtaaagcttagcgaacaccatcctgacgcagggcggctggcgagaagtctgcggtgctggcagtgaagccgaagtcatacgcctgcttctcttcgttcttcatgcccagcgcgaggtagcggccggactgcaggtcgtagagggtttcgagggcgtaccacggcacttgtttgtcgtagtagttctcggcatgggcttcggcgacacgccacagttggccacggccgtcgtaatggtcgatcacggccgcttgccaggtgtcttcgtcgatgaagaagtcacgcttggcgtagatatggcgctggccttccttcagggtcgccaccacgtgccagacgcggcgcaactcgtaacgtgccaggtcctggttgatgtggccggctttgatgatatcggcgtacttgagcttcggatcgtcaatcttgtagctgttggacgcaatgtagatctcttttttgccttccagcttccagtcatagcggtctggcgcaccgttgtacatgtcgaggttgtcggaagtccgcaggccgtcggcggcggtacccgggccgtcgtaggacacttgcggcgcccggcgcacgcggcgctggccggcgttatagacccacgccgaacgcggctctttgacctggtccagggtttcgtgcaccagcagcacaccaccggccagacgggctggcgcggtcacttgctgcttgaagtagaacagcacgttgcccgggtttttcgggtcgaagtccttcatcttgtcgcggaacacgaactggtctttgaagtacaccaggctgaacgagccgttggtttgcggcgtggcctgggtcaccaggcgggtcacgctgccaccgcgataacgggtgatgtggttccagatcacttccacgccgcttttcggaatcgggaatggcacggcggtttcgaagttttccaggccgttgccgcccgacaccaggttggtggtggtggcgttcttcttgatggcggcaaacacatcggccggcacagttgcgccgcgatgggtcgggtaaaccggcatcttgaaggtgtccgggtaacgcttgaacatcgcgtactgccccggtgccagcttgtctttgtattgctccacgttttgcgcggtgatagtgaattgcggttgctcgctggcataagggttggcgaggaacccacgggcatccacggcgccggcattggtgggcagtggcgaccatttcggaatggtgccggccgcgttaccggccatttcagcgcccatcggcgtcagggtcgtgcccagcttggcggcttcatccgccgagactgccgccatgacgttgctcgccaggatcgacagcccgagcacacccacatgcaacagacttttagttattttcatgttctggttcttcctgaaatgcatgcatctgaaaaagacagtcttagaagttcacgccagcgctcaaggcgatgaagtcacggtcatccacggtgctgaacttgccaccaaagaagttggtgtagttcaagcccacggtgtaggtgttctggtactcggcgtccacacccaggctgacggccttgcgaccttcttcaaagttggcgccagggcctggcgagtaacctttgacgtcatgggaccaggccacgctaggcttgaggttcacaccggcgaacacatccgggtattcccagatggctcgggcgcggtagccccaggacgtcgcagtggtgtagccgtcgttgttgcaattggtgttcaggccggacgcattcggcaggcctgcaccttgagccgtcgagttgttaagcgcattgcagaagccgccgggcagcgtgccagggccgaagaccggatcgcggccataacgtgcctggtttttgctctccaggccgcccacgtgggtcacgccgatttcacccacggtggtcaggcgggttgcgcccatcacctggtcgaagaagtgcgtgaaggtggtctggaactgggtcacttccttacggttgtagccgtgcaggtcctggcccggtgtgcccttgagcaccgacgcattttcatagccccgaatcggcgtgacgcccgcgtacaggatgtcggtggtgctcagttgtaccggcgcgtttggccggtagctcagttcaccactccaggcggtgccggtaggcagcgtggtggagaagctcaagccgtagaggcggatatcttccgggtactcgacaaagtaccgggagctgcctgccacgatcaacggacgcaaagccgccagttgccccagcggacgggtgtaggccgagtttggcgcaccggtcgcactgaaaatcggcgcacggctgtggtagttcatgaagtaggcgccgaattccgtgtccagcggctcgaagttgtagtgcatggccacgccgaactggccgctgtcccgtgcatcacggtcgccgccacgacgtaccagcacgccttcgttattcacgtccacgcccagggcggtaagggttggcaaggcagcagccggaatggtggagcgcttgttcagcacgcgcaggttatcgccgcaaccgtcggcaattacgtccggctgggagaagaacgtaccgcagttatccaccacggtctggtcccactccaactggtagaaagcctctgcggagaggttgtcggtcagggtctgggacacgtagaacatgttgaccggaatcaggccttccttgatctcggcacccggacgacggaacgcggatacgtcgatcgggttgatcgagttgatgccgccgccgatgaaggtgctttcaccccagctcaccacctgcttaccgaaccgcacgttacccggctgatcagcgatggtgtagttgtggtagatgaaggcatcgagaatctgcccgccagaggatttggccccctctttgcggttgtcattgctgacgtttttgaagtccaggtcttcgttttgcagcgcgaagtcgtaccagtatttgccccggacaaagatgccggtatcaccgtatttcaactcaaggtcatggatgcccttgaagatcttcgaaaaggagtcgcccttgttgaagttcaggtggccgtcgtcggaggtctgggacaaccccttgccaccgttgttggcgccgatcaggtctttgttccgactcgccgtcgaccagctcgcccccaccgacagggaggaatcgaagctgccttcgatttcaccgatgttgaaactgacgccgaatgcgggcccggcgagcgtagaagcgagactgacggccaggggcagtcttgcccggcgccagaactggtttactgagatcatcgacgctactccatgtgcattattgttatggcagtgagttctttcttcaggatgcatgtaacggccggaatacaacgattccaatgccgccgggcaaccggggccccatgccccgaaacgcgacatccatgaaaaactctgggtgggactatagccagcagggggtaccgcttgatccctctaaagtgtgatttgcatcaccaacccgtctgccacagtcctttcgccacgccgacgacagtcggcgcgggaaggatggctgaaaatccggaaatcacaagtgaaggcgcgagatagagcagtgcgtgcccgaaagggcacgctgcaacgtttcagagggtggacaggaacgtactgttgttggcctgccattcgatgatgtcgatgcggatacgttttttgtcgagtttgccgacactggtcttgggaatttcagtaacaacggcgatctggctgggaatcgcccacttgctcaagtggcccagttcgacgaaaggtttgaggtgttccttgagctcgcgggcacctatcacatggccatcacgcaccaccagcaacgcaaacgggcgctcgccccactgcgggtcggcgatgcccaccaccgctacttcgcgtaccgccgggtgacggctgaccaggtcttcaagggccagggacgagatccactcgccgccggtcttgatcacgtccttgatgcggtcgcggatatcgatcacgccgaaagcgtccagcgtggcgacgtcgcccgtgtgcatccagccgccggcccacagctcggcgcccttctgtggttcgttgaaatagccttcgctgagccacggcgcacgcagcaccagctcgccctgggattcgccgtcggcaggcaggaaattgccgtcgccgtcgacaatcgccgcctccaccaacggcccgggcacaccggccttgatgcgatacgtggtgcgttcgtcttcgctgccggccatcaattcttcgttgaggtgggcgcaagacaccagcggcccggtctcggacatgccgtacgcggcggtcagttgaatcccacgcgccttggacgcttcatacaacgagcggttaagcgcactgccgccgatgacgattttccagccgccaaaatccacgccttgcgcagccttggcgttgagcaccatctgcaggatggtcggcacgcaatgggagaacgtgaccttttccttgcgccacaactccaccaggtattccgggtcgtagcggccggggtagacctgcttcaaaccgagcatggtcgccacatacggcaggccccaggcatgcacgtggaacatcggcgtgatcggcatgtacacgtcgttggtgcccagcaagcgaacgctgtcgacgctgcccatgatggtcgccacgcccatggtgtgcagtaccaattggcgatgggtgaagtacacgcccttggggttaccggtggtgccggtggtgtagaaggtggtcgcgacggagtgttcgtcgaagtcctggaagtcgtacttcgggctggcggcggctagtaaggtttcgtactcaccaaccagaccgggcagctcggcggttttgacctctccatcggtcagcagcagggtcttgtcgacggtggtgaggtggccggcaatcgcctggtagagccccacgaactcgctgttgaccagcacaaagcggtcctcggcgtggttcatggtgtagagaatctgttccggcgacaggcgcacgttgatggtgtggatgaccgcgccgatcatcgggatggcaaacatgcattccaggtagcggtggctgtcccagtccatcacggccacggtgtcaccggccttgaccccggcctcggtcagcacattggccaggcgggcgacgcgctcgatcagggtcgggtaggtgtaacgcagcttgtcgcggtagacgatttcccgggttttctcgtaacgcgtcccggacatcaacaggcgtttgatcaacagcgggtattggtacgcaccttcggcgggcgggataacacgggtctgcaacatacgaatcccttatctgactgcacggtcttggcttgaagacctgcactgtagagagcttatgtgtcagccaaatcagccaaaggaatgatttgttgcggcccgtgaatgctagctttgcgccagcactggagccttgcgcagctccgtgtgggagctggcttgcctgcgatggcctcaactcggtatgtctgaaacaccgaggtgcctgcatcgcgggcaagcccggctcccacagcgatcgggcctacccatgaagggtgttccctcagcagggttacttcatgctggtaaacgccagcttcacgccaatggcaatcagcaccgcgcccatggtccggtcaaaccagtgccccatccgcgcaaaccccgcgcgcacgcgctgctggctgaacagcatggccaccaggcagaaccacaacgccgtcgccaccgccaggtacacgccgtaaccggcctggatcgccagcggtgtgtgcgggttgatcaccacggtaaacagcgacaggaaaaacagcgtggccttggggttcaaaccattggtcacgaagcccgaggtgaacgcgccgcgcgccgtgcgctcgcccacttcacggtgcaggtcttcttcgccggcaggtttggccggctgcgcgcgcagggccttgaagccgatgtacagcaaataagccgctgccgcccacttcagcgcgttgaacaacacgatggattgggacacgatcaagccgattccgagcagcgaataccccacgtgcaggaaaatcgccgagccgacgcccagcgcagtccaggtaccagcacggcggccatgggtcacgctttcgcgcaccaccacggcgaaatccgggccggggctggccaccgccaacaagtgaatcaaggctacggtcaaaaactcggcggcgtacatgctcactccattaagtaactgattatttcatctgataggctcgggagattacgcctacaaacccagtcgcaaaaggtacagttgatgtcgaacaatcgccgcgccgtcttccttgatcacccgtccctggacctgggggacctcgacctcagcgaactgcgaggcagcttcagcgaacttgagctgtgttccgacaccacgccgcagaatgtgctcgagcgcgtgcaaggcgcccaggtggtcatcagcaacaagatcgccctcaacaccgaaaccctggcggcgtgcccggacctcaagctgattctggtgtcggccaccggcaccaataacgtcgacctggccgccgcacgcgcccacggcattaccgtcagcaattgccagggttacggcacgccgtcggtggcgcagcacacaatcatgctgttgctcaacctggcgacacgcctgaacgactatcagcgcgacgtcagcgcgggcaaatggcagcaagccaggcagttctgcctgctggatcacccgattgtcgaactggaaggcaaaaccctcggcttgctcgggcatggcgaactgggcggcgccgtcgcacgcctggccgaagcctttggcatgcgcgtgctgctcggcgcgattcccggccgcccggcccgtgccgaccgcgtgccgctggatgaactgctcgcccaggtcgatgcgctgaccctgcactgcccgctcaatgagcacacccgcgactttatcggcgcccgcgaactggcgctgctcaagcccggcgcgtttgtcgtcaacaccgcgcgcggtggtttgatcaatgaacaggcgctggcggatgcgttgcgcagcggccatctgggtggcgcggccaccgatgtgctgagcgtggagccgccggtgaatggcaacccgctgctggccggcgacattccgcgcctgatcgtcacgccccacaatgcctggggcagccgcgaagcccggcaacgcatcgtcggccaattggccgaaaacgcccggggctttttcagcggcgccccgctgcgcgtcgtcagttgataaactgcgccccttttcaaggagcagactatggatccgcgcagtgaagtactgcttcgtcaggccgaactttttcaaggcaatgtgctgctggtcggcctgcccgccgacgatttgctcggccgcctgcccaatgcccacggctggagctggcatgctggcgaccaggctgcgctggaggcgcgcttccccgaacgcagcctgttcggcgtgaacgtgcccgagcgtgggttcgatgcggcggtgatctttctgcccaagtccaaggacctcaccgactacctgctcaacgccgtggccgcgcgcctgcccggcgcggagttgtttctggtcggcgagaaaaaaggcggcatcgaaagcgccgccaagcagatgattccttatggcaagccgcgcaagctggataacgcacggcactgccaactgtggcaaatcaccgtggccaacgccccgcaggcagttgagctgcaaagcctggcgcaagtctttgacgtgcccctggccgaagggccgctcaaggtggtgagtctgccgggcgtgttcagccatggtcgcctggatcgcggtacccagttgctgcttgaacacctggacaaactgccgagcggccacttgctggacttcggttgcggcgcgggtgtgttgggcgctgcggtcaaacgccgctacccgcacaacagcgtgacgatgctcgacgtggatgcattcgcggccgccagcagtcgcctgaccctggctgccaatggtctggaagccgaggtgttgaccggtgacggaatcgacgctgcgccgatgggtttgaacgccattctgagcaacccgccgttccatgtcggggtgcataccgattatttcgccaccgaaaacctgctgcgaaaagcggcgaaacacctggcaaaaggcggcgaacttcgccttgtcgccaacagcttcctgaagtaccaacccttgatcgaagagcatttgggcgtgtgcgcaatcaaggccgagggtaacggttttcgcatttatcgtgccaaacgcggctaatggcattttgaaaaagaaggcttgccgaatggattttgcctaggcagaatccgctccgtcctaggggagtagtctcccacgagcgccacgctcgtccggcatacgtcaacatacttggtcaacaggccatggcgtatgcgacccaggagtccgcacagacggaccggggtttgacaagacctatgacacgcacaccttacccggggcgggaaggctgtacgtgtcatagccgtgtcgacccgcccctggaagcttacctgatgctggattcattactcgttcctaccgcaatcgttgccttggccgaaatcggcgacaagacgcaactgctcgcgctcatccttgccgctcgctttcgcaaaccctggccgatcatcgccggcatcgtcgccgcgaccttggccaaccatgcggccgccggtgcggtgggggcctggttcggaagcttcttctcggatgcggtgttgcactggatcctcgcggcgagcttctgcgccaccgcgttgtggacgctggtgcccgacaaactcgacgatgacgaagccagcaccacgcgcaagttcgggccgttcctgaccacgctgatcgcgttcttcctcgcggaaatcggtgacaagacgcagatcgccacggtgatgctggccgcgcaatacccggagctgtggctggtgattatcggcaccaccttggggatgctgattgccaacgtgccggtggtgttggcggggaatttcgcggcggagaaactgccgttgaccctgattcgccgactggcggctacggcgtttttcgtgctggcgattgttgcggtgtacaaggccatgcagagcagtggctggatctaaaggggctgggcttttgtgggcgctggcttgcctgcgatagcatcacctcggtgcaactgacacaccgaggtgcctgcatcgcgggcaagcccggctcccacacaagccaggctcccacatttagatttgcatttcagccttatgaatcaggactttttggcctgctggtacagcggcatcacctttggaatcgccgcctgcaacgaggcgattcggctgtcagacgccgggtgcgtgctcatgaactccggcggcgcgccttccgaagccttggccatcttgttccacaacgtgatggccgcgttcgggttgtagccggcgcgggccgagagctccaggccgatcaggtcggcttcattctcgttggcgcggctgttgggcaaggtcatgccgtagttggccacggtatcggccagcgccaggctgtcctggcccagaccgaacaaggcaccggcgccctgcttggccatctggatgccgtaagctttggacatggcctcgcgcccatgctcgcgcaaggcgtgggcgatttcatggcccatcacggcagccagctcgtcatcggtgagcttgaggttgtcgatcaacgcgctgtacacaaagatcttgccgcctggcccgcagttggcgttcatctcgtcgcttttgatcaggttcacttcccacttccactgcgccgcatccgggcggaaagtcggcgcctgggcgatcaggcggttggcaatcgcctgtacgcgcttggcgttggcgctgctcttgtccaccaggcctttgccactggcctcacccaacgtctgttgatatgactgggcatacatctggtcgacttcctggctcgacagcatgctgaacatgtattgcttgcgctcgaccccaacggcgccgccgctggtggtgttaaccgactggcagcccgccagcagcatggctgcaaccaatccactcatcgccaatgactttttcatcacactctccctgaaaacctggcgcgtatcgtaggcggtcgtttgtatccacgccagatacaacagacgtgtaaccgcccaatttcagatacatcccacacgctcataccggcggcgaagtgctcatttgcgacagcacgcactattttgcagggcaagccttaagccacccaaccccgtggccgatacaaaaaagcagccaatctcccactgggcacggagcgttcatgaaattcaggtcgattcagttttctgtcgcggcactcaccggcgccatcgtgttgagcgtggtcgcagtgctggtgctctacgccttgtttgccggcgcgcgcactcaggagatggtgcaagcacgcacccaagtgcagttcgagcaaattatcgaacagcgcctcaccgccatggcccaaacccaggccacgctgattcagcgcgagctcgaagcaccgctggtcaccgccaagggtctggccaccgccaatgccctgctcggcatgaaagacgccaagggcgagccggctctgcaagtcagccgtgaacaattgatcaacctgctgcacgaaacggtggtgcgcaatccgaaaatcctcggcgcctatatcggctgggagcccaatgcgatcgatcacaacgacgccgcttacgtgaacagccccatcgtcggcatgggcgccgacggccgtttcctgccgtggtggtaccgcaacgccgatggcagcctgggcctggataaactcgccgatgtcaacgatcagaacatcctcgccaccggcgtgcgcgccagcgagtactacctgtgctccaaggaaaccaacaaaccctgcgccatcgaccccgcgccttataaggtcggcaacgccatggtgatgctggcctcgttcattgagccgatcatgatcaatggcacctttcagggcatcgtcggcgccgacctgtcggtgaacttcatccaggaaatgctcacccgcgctgaccagagcctctacaacggcgccggcgaactggcgctgatctccagcaacggccgcctggtggcctacaccaaggacgccagcaaactcggcgaaaaagccagcgacctgctcgacagtaatgagctggccaacctgaaccagttgaaggtcggcgaagtgcgctacgacatcgacaaggagcacgggcacatcgagttgttcctgccgttcaacatcggccaggccgaagcgcgctggaccctgatgctgcaactgccgctgagcgcggtaatggccgactcgcagcaactgcaaagcgacctgcaggcacagcgcaagaccgacaccgtgggcatggccatggtcggcctgttgatcgccggtattggcctgctggttatctggctggtgggccatggcatcgcccgcccgctcaagcagatggtggcgatgctcaatgacatcgcccagggcgaaggtgacctcacacgccgcctgaccagtgaccgcgccgatgaattgggcgcgattgccagcggcttcaacacctttctgatcaagctgcagggcatgattacccaggtggtgagttcggtgcagaaggtcagcgactcctcggaacacaccgccgacatcgcgattcgcaccaaccagggcgtgcacaagcagatggtcgagatcgaccaggtcgccaccgccgtgcatgagatgaccgccaccgcgcaagacgttgcgcgtaacgccacccaggccgcacaagccgccagccacgccgaccaggcggcaagccagggcatgcgcattgtgcgcgacacctccacctccatcggcgcgctggccgaagaaatcggcaaggccgtgggggtggtgcaaaccctggccaaggacagcgagaacatcaatgcaatcctcacggcgattcgcgggattgccgagcagaccaacctgttggcgctcaatgcggctattgaagcggcacgggcgggcgagcaaggccgtggttttgcggtggtggccgatgaagtgcgcaacctggcccagaaaacccaaaaggccaccgaagaaatccagaccatgatccagcaactgcaacaaggcacgcgggacgtggtgcgggtgatggaagacagccaaaaccgtaccgatgaaagcgtgcaacatgcggccaaggccgccgaggcgctggagaccatcactcaggcagtgtcggtgatcaacgacatgaacacccagatcgccagcgccgccgaggaacagagcgcggtggccgaggacatcaaccgcaatgtgatcaatatcggccaggtcgccaacgaagtggcgggcggcgcggatgagtccagcgcggccagtgcggatttgaccaagctggcggagcagcagcggcggttgatcaatcagttcaaggtttgaggccgccatcgcaggcaagccagctcccacagttgaatgtattcacacatccagtgtgggagctggcttgcctgcgatgaggccagtgggttcaaccgctaagccggggtcaggcactccggcccattgagcttgggatcattgaccatattggccagcacccgctcgcgcagcgcaacgggttcactggccaacaacgcgtgcaacacatgcaagggcgtctcgggattcagccaggcctcttgccccgccgcatccagaatcaatggccgacgctggctctgggcagcctgagtgatcacggccgtactcaaccacacctgttcctgcaccggatacgcctcccagatcgccgcaaaaaacagcgtggagccctcctccggcgtcagccaatacgggcgtttgcgctgggtaccgcgccattcgtagaacccgttggccggcagcaggcaacggcgttggcgcaacgcttcacgaaacatgggctgctcggcgagagtctcggcgcgggcgtgagcgggcgtgcgggacaggtctgtcagccagggcggcgtcaggccccagcgggcgcgggccagggtgcgctggccttcgctcaaacgctggatcagcactgaatcattgggggatatgttccactgagccaactgatcggccggaaagcccggcagggcagcaaaagcggggttccagcgaaacagggcataacgtccacacatggggcaacacgactctagggtaaaccgaccgacagcctaacagaccaacacgtcggggaagctgtcgggttcatcgccgggcaaaggttgcgcgccgatgtaggcggtaatcagctcgcgggcgtaggcggccctgtcgttatccacctccagccccagcagcccgaaaatcggcagctcgccggtacctccaagcaaatggcggccgaccagatgcgcctcgatgccctcgctggcgagcatttgttgcagcagctcgccttccatcaggttttcaggctcgtagattcgcagcatggccgtacctgttattcgttttcactacgggtttcgagcatccactcgtcaccatggacctgcagatcgaaaatgatcggccggcaacatacctgacagtcctctatgtaaacctgatcaccaccggacaagtcgaccgttgtctcaacttcttcaccacaataaggacaatcgtacgtcgcgttttccagcatcgcagcctccagagtgacttgtgcgtataatcgccggtctatttacagggctattttcggccgagcccattactcgggcctccccctggcatttcctttacttaccctagccgtttctaacaagagagcatgatgggcgaattcgataccatccgaccttacaacgacagcgaagtcccggcagtgctggcacgtctgttcagtgacaaggcctttctggacatcctgacccacttccgcttcccgcgctttgccggcgccctgggctggctgctcaagccgatgatcgcccgcaagctgcgccgtgaattcgccggcgtcaccaccgtggccacgctgcaggacaaagtcgagtactacgtcgaccacaccatcgaccgtgcgaccgacggcgtgacctataccggtgtcgagcaactcaagtccggcaccgcctacgtgtttctggccaaccaccgtgacatcgtgatggacccggccttcgtcaactacgccgtgtaccacgccggcctgccgacgccacgcattgccattggcgacaacctgttgcaaaagccgtttgtcagcgacctgatgcgcctgaacaagagtttcatcgtgcaccgctcgatcactgggcgaaaggaaaagatggcggcctacaacctgctgtcggcctatatcaatcactcgatccgtaatgactgtgcatcgatctggatcgcccaggctgaaggtcgcgccaaggatggggatgaccgcaccgagtcggcgatcctcaagatgttccacgtcagccgcaaggacgagccgtttgccgaggtgatccagtcgctgaacctgacgccggtgtccatcagctacgaatatgacccgtgcgattcggccaaggcccgcgagctgtacatccgcgccaccaccggcacctacagcaaagccccgggcgaagacgacgtgagcattgccttgggcattaccggctacaaaggccgggtgcacgttaacttcgcgccgccgatcaccgagcgtttcgaagacaccaagctattggccgtggaaatggaccgacagattctggggggctatcggttgtttccggttcattacctggcgtacgcgcagtgggccgacgcggacccgcaattgcaggtgccgatggcggccgaggtgttcccggccgatgagttggccaaggcgaaagcagagtgggagcggcggctgaatgagtgcccggcggagcatcggccgtttctggtggtgcagtatgcgacgccggttcgcaatcagtaccgggtaaaggccgggatccccctgtaagcaccgaatcaaaatgtgggagctggcttgcctgcgattagcaatgtgtgattcagcacatcagtgactgaaccggcgcaatcgcaggcaagccagctcccacagtcgtttggtgtgttcttagaggcgggtgctgagccaggagacagccagcgccagcccaaggcaggcaaaccccacgcggtaagccaagcgatgcgcccgttcggtgcgcacatccagaaacaacatgggttggtcgatcgcacggtcttcgctttgagcggtcaggtcggccatcgcgcgttgctcgcgcaagcgggtaatgaacagcagccctgcacccggacaggccaccaataaagccacagcattaatgagcagtgcgggcagcgccatcgcaaacctcggtcaatcagtgttctggtatcaattcagatacaaacctgaacgatagtggcgtcctgcgcctgaaaagctccgtcccccatgtacgcttaatgtatccagtaatttacagcgtcacctgaacgtcaccttaacaagccactctgttgcccttcgaacgcttgggagcttgtcatgttgcacgcgcaaaaccaggaccggctgtacctgatcaccccgaacgaggagcaggaagcactggtcggaggcctggctttcaacgtccaggaccgccactggctggtgtattgcgcactgggcgggcacgtgcatgccgatctgccggagctggacttgctcacgggtgtgagtgtgctggacttctatgtcgaaacggctgcatgaaagctacaggcacaaaaaaccgggcccatcactgagcccggtttttttggctgacggttactgcgagctgagcaactggccgatgctcgggtctttgaacagacgggtcagtgcgtcactcagcacatcgctgaccagcttggtgttggtttcctcgttcggcgacatgccgaaacgctggttcagggaagcaccataacggccgctgtagcgacgggtaccggcactgacatcggacttgaacgtcgcaccgatggaggcctcagtcacatacaggccttccttgggggattggtacttcagctccgccagggtgatggtcaactgtggcgcgcccggcgagttggccggggtgaagcccaacaggcgcacagcggcttcggcctgggcctgcagcttgggcagtacgtcctggccggtcaccgaaatcagtgcggtttcagggtacaggccgccacgggaacccagggttggcgacgggcgaccatccaccacacgcaccgacactggctggccatggccgacaggcgccagctgcgtggtgagtttcggttgcgggctgagttgttgcgggctgttggcgcagccaaccagggtcaagctggtcacagtgatcaaaccgaacaacaggcgttgcaacatactcatttctccaggactagatgcaaacaggccgccagtataacggtgcaggcgcgccactcaccagcgatcctgaacggcggctgaaggcctgttcgaattacaatttcacataaatccgtcattccaatgtcatggcacactggcaaccttcaagcatgtaacgtaaccggtacaaagccatgcgccttctcaaatcgttgttcatgccaaacgcgcgcctgcgccactacgccctgctcgacagccatggccattgcctggcgttcaagcagtgcagcctgccgcccgtcggcgagggttgggtagaagtggtcgagacgcacctgggctggatgcaccgcccgctgccgtccagtgcccgcatcactgcgcaggtctcacatgcacaaccgcaacatgcgttggcctcctgaccgaagcactaataaaagtcataaaacacgcccatttccccagcgttcttcgctacaatctccccccgattataaggacgtctcctgatcgggcctcgcagcatcgttaatgccccggcattagccacccaatcgcccacagagagccgcccacacagatcgagtgaagctggcgtgcttgctgttttctttgcaaaccctccctctttaccgaatctgccagagctgccattgcgctcggccacttgagttgtttgcccgtattgccgcgtgtcggcaggcgtcacgggccaggtgccaggctggggcagcccttttttgaggttcacgtcttcaaaagagcgtgaaaaaacgggttttcacaacttcacaagagtgtggcgagcaaatgaatagtttggcgtttgtacaagcaccatcagcgtctggaacagcccaaccacacaggaccgagtactcctcaaaaaccggagcttgaagcctgtccgctacggatttggttgcacgaattgcacgctttgaccataagtcgaattgccacaggcgcccatgaatgcgttcataggcagattaacccggcaggaagcgtgcgctgaagttgcaaaaaaattgcgaagaatcggacatggcgatcctggccatgggtaatctggggcaacacgtgaaccgccccatcactcctggccgccatgccgtcaatttggtgctgcagattttggagacgcgttaaatggcgcataacgaagcagtcgacgtagtactggtaggggccggcatcatgagtgccaccctggccgtactgctcaaagagctcgaccccggcctcaagctggaagtcgttgagctgatggattcgggtgccgcggaaagttccaacccgtggaacaacgccggtaccggccacgcggggctgtgtgaactgaactacacgccgcaggctgccgatggctccatcgatatcaaaaaagccgtgcacatcaacacgcagttcgaggtgtcgaagcagttctgggcatacctgactaaaaaaggcacctttggctcgtccaaatcctttatcagcccggtaccgcacctgagcttcgtgcagggtgaaaaaggtgtttccttcctcaagaagcgttttgaatccctcagccagcaccacgcgttttcggacatgcattacaccgaagaccgcagcgaaatggccgagtggatgccgctgatgatgccagggcgcccgctcgacgaaaaaatcgccgccacccgtgtgttgaacggcaccgacgtcaacttcggcgctctgaccaaccagctgctgggtcacctgaccagctcgctagatgcccaggtcaagtactgcaagcgcgtcaccggcctcaagcgcaatggcgccggctggaccgtgagcatcaaggacgtcaacagcggcaacagccgtgaagtggacgccaagttcgtcttcctcggcgccggtggcgcggccctgccgctgctgcaagcctcgggcatcgaagaaagcaaaggtttcggtggtttcccggtcagcggccagtggctgcgttgcgacaacccggaagtggtcaagcaccaccaggccaaggtctacagccaggccgccgtgggttcgccaccgatgtccgttccgcacctggacacccgcgtagtggatggcaagaagtccctgctgttcggtccatacgccggtttcaccaccaagttcctcaagcacggttcgttcctcgacctgccgatgtcgattcgcgccggtaacatcggcccgatgctggctgtggcccgcgacaacatggacctgaccaagtacctggtcagcgaagtgcgccagtccatggaacagcgcctggaatccctgcgccgcttctacccggaagcgaaagccgaagactggcgcctggaagtggccggccaacgggtgcagatcatcaagaaagacccgaaaaaaggcggcgtgctgcaattcggcaccgagttggtcgcggctaaagatggctcgctggcggcactgctgggtgcgtccccgggtgcttcggtgaccgtttcgatcatgctggagttgatcgagaaatgcttcccggaaaaagccgccggtgagtgggcaaccaagctgcacgagatcttcccggcgcgggaaaaggtcctggagaccgatgccgagctgtatcgcaagatcaacgcgcagaacaacatcagcctggagctggttgaacctgccgccgagaccgagagctacgcttgaggccttgatgcaataaaaaacgccccgctctcaacctgagaacggggcgtttttttatgtctcgaatatcagccgcgagcgttttcgatcagctcgatgtactcgtccgcgttgcgctggtccttgatcaggtcgacgaaggtctggccgtgctcatccttgccgtccaggtccagtcccgcggccttgaaaaagcccaggaaacgctcgaagtcgtcgatacgcaggccgcggtaggccttgatcagcttgtgcagggacggtgaagtcgcatcaaccggctcgaagtccaggaacaacttgatctggtcgtcgccgatctcgtcaccaatcacctgtttcttatctttacgcattaccgactccagcctgcagacatttacacggggtttgaagtctacctgccgaacaccaccttcgaaaacaaccaaacactcatgtgggagctggcttgcctgcgatagcggtgggtcaactggccctctgtcacagatagaacgctatcgcaggcaagccagctcccacattaattgcatccacatagcggagtctgtgtcgcctgactacttcgcgcgaaccgctccggtgtgcaaatccgcccagatgtggccgttggcgtagctgaggaattgcacatacaccgtgtcattgcgcagcaggtcgacaatcacgcggtattgggccaccgggtaggacaaggtcagggtcttgctcttgtcatcgtaggccggttttttcaggcttttgctttcggcgtcaaagttgagcactacttgggcgatggtcgcgcctttgttcagggacttgcccttgaggcggatcatcagtggcgaggtcaccggaatcggttgctgggtggattgacgctggttgccgacgacaaccgcgtactcggtcacttgcagcagttgctgctggtcggcagcctcggcgcgcagtgtcaggtcgtcgggcggcaaaaactggctgtgcatcaccgcaggcgcggccgccaacggcaggctgagagtcagcgccagggtggcgcaagtgcgtatcaacaggctcatgaacggctccaggcgcaggggcaggcactctagcatgccggccctgcacctattgaagcgcgtttacatgcctttgaccgcgtagatgccattggcattgcgccagtaacctttgtagtccatgccgtaaccgaagatgtagcgatcgatgcacggcaggccgacgtaatcggctttgaggtccgggcgcgccttgcggtcgtggtctttgtcgatcagcacagcggtgtgcaccttgcgcgcgccggcgtgtttgcagaagtcaatgatcgcgcccagggtgtgaccttcatcgaggatgtcgtcgatgatcagcacgtcgcggtcgatgaacgacacttccggcttggctttccagaacaggtcgccgccgctggtttcgttgcggtagcgggtggcgtgcaggtaggacgcctccagcgggaattgcaggtgggtcagcaatttgccggcgaagatcaggccgccgttcatcacgcaaaagaccaccggattggtgtcggccatttcgcgggtaatgtgtgcgccgacctcggcgatcgctgcttcgacttgcgcttcggtgtacaggcagtcagcctcacgcatgatttgacggatatgctcaagatcagcggacatggcgctctccaagggggtgctgtggcaagaaaagcgggcgaaggtacgcttctcgtgcgctccgggcaagccttaatggactaacgtactagatgtctataggacaacaccctcggatagattaatctaggccggtttttttgcccgccgccggagcctttcccatgcccattcgcgagatccgccacccgctgatccgacacaaactcggccttatgcgccgcgccgacatcagcacgaagaatttccgtgagcttgctcaggaagtcggagcgctgctcacttacgaagccaccaaagatttgcccctggaaaactacgagatcgagggctggtgcggtactgtccaggtcgagaaaatcgctggcaagaagattacggtcgtgccgattctgcgcgccggtatcggcatgctcgaaggcgtgctcagcctgatcccgggcgccaaggtcagcgccgtgggcgtggcacgcaatgaagaaaccttgcaggcccacacttacctggaaaaactcgtcccggaaatcgacgagcgcctggccatgatcatcgacccgatgctggccaccggcagttccatggttgccaccatcgacctgctgaaaaaagccggctgcaaggacatccgcgccatggtgctggtcgccgcgcccgaaggcattgccgccgtcgagaaggcccacccggacgtgcagatctacaccgcgtccatcgatgaacgcctgaacgaacatggctacatcattccgggcctgggcgatgccggcgacaagatcttcggcaccaagcagaaggacgcgtgagcatgcaggatgaattcaacgacccgctttggcgccagatcctgtctggcgcacaaatgctcttcgtggcatttggcgcgctggtgttgatgccgctgatcacaggtcttgatccaaacgtcgcactgttcaccgccggcctgggcacgctgttgttccaggtggtgacagggcgtcaggtgccggtgttcctggcatcgagctttgccttcatcaccccgatcattctcgccaagggccagttcggcctcgcggcgaccatgggcggtgtcatggcggctggtttcgtttatacctttctcggcctggccgtgaagatcaaaggcaccgggtttatcgaccggctgctgccgcccgtcgtcattggcccggtgatcatctcgatcggcctggccatggcgccgattgccgccaacatggcgatgggcaagagcggcgatggcggcgagttgatccattaccagacggcgatgatgatctcgatgccggcgctgctgaccacgctgatcgtggcggtgttcggcaaaggcatttttcgcctggtgccgatcatctccggcgtgctggtcggttttgccatgtcgttctacttcggcgtggtcgacaccgcgaagatcgccgccgcaccgtggttcgccctgccccacttcaccgcgccggaattcaactggcaggccatcctgtttatcgtccccgtggccctggccccggcgatcgaacacattggtggcgtgattgcggtgggcagcgtgaccggtcgcgactacctgaaaaagcccggcctgcatcgcacgttgctgggtgacggcatcgccaccacggcggcgggtctgtttggcggcccgccgaacaccacctacgccgaagtaaccggcgcagtgatgctgaccaagaactacaacccgaaaatcatgacctgggcggcggtgtttgccatcagcctggcatttatcggcaagttcggcgcattgctgcagagtattccagtgccggtgatgggcgggattctgtgcctgctgttcggctctatcgcggcggtgggcatgaacacgttgattcgccacaagatcgacctgggcgaagcgcgcaatctggtgattgtgtcggtgacgctggtgttcgggattggcggtgtattggtaggcaccggcaccggcccggacgacttcggcctcaagggcatcgccctgtgtgcggtggtggcgattggtttgaacctgctgctgccgggcaatgatggctggaagaacaagaagccggatgagccgctactgtaaaaattcggcgttgctgatggcctcatcgcgggcaagcccggctcccacagggaaatgcattccaatgtgggagccgggcttgcccgcgatggggccagttaagccaataaagacttagagctcgccgaggccgtcgaccagcgcctggttctgctccggcgtaccgatgctgatccgcaggaactgggcaatccgctcctgcttgaagtgccgcacgatcacaccctgctcacgcaacttggccgccaggccggcagcgtcgtgcttggggtgacgggcaaagatgaagttggccgccgacggcaatacctcaaaacccttgccttccagctgcgcgaccatcgtgttgcggctgttgatcaccaaccggcaggtcttctcgaagtattcacggtcctcaaacgccaccgccgcgccgacaatcgccaggcgatccagcggataggagttgaagctgttcttgacccgctccagcgcctcgatcaggtccgggtgacccacggccaggcccacgcgcaaaccggccagtgagcgcgatttggacagggtctgggtcaccagcaggttcgggtagcgatccaccaggggtattgcggtttcgccgccgaaatcgatgtaagcctcgtccacaaccacgaccgactcagggttggccttgaggatctgctccacagcctccagcgccagcaagcaaccggtcggtgcattcgggttggggaaaatgatcccgccgttaggcttggcgtagtccgccacgcgaatctggaactgctcatccagcggcacggggtcagacttgatgccataaagcccgcagtaaaccgggtagaagctgtagctgatatccggaaacagcagtggcagatcgtgttgcagcagaccgtggaagatatgcgccagcacttcgtcggagccgttgccgaggaagatcttgttcgcgtcaacgccgtaatatttcgcgaccgcctgcttgagacggtcgctgttggggtccgagtaaagacgcaggtcgtcattcaactcggcccgcatggcctccagcgctttgggcgaggggccatacgggttttcgttagtgttgagcttgaccagtttggtcagcttcggctgctcgccgggcacgtaaggcaccaagtccttgacgaaggggctccagaatttactcatgtcttatttcccctcttccaggatgcggtactcagcgctacgggcgtgggcgctgagggattcaccacgggccagcaccgaggcggtcttgcccagttcagatgcgccttgtggcgagcagaagatgatcgatgagcgcttctggaagtcatacacgcccagcggcgacgagaaacgtgcagtaccggaagtcggcagcacgtggttcgggcctgcacagtagtcacccagagcttcgctggtgtggcgccccatgaagatcgcaccggcgtggcgaatggacggcagccaggcttgtgggtcagcgacggacagctccaggtgctccggcgcgatgcggttggccacttcaatggcttgttccatatcactcaccagaatcagcgcgccgcggccattgatcgacttctcgatgatctcggcgcggtccatggtcggcagcagcttgtcgatgctggcggcgaccttgtcgaggaactcggcatcggggctgaccagaattgcctgggcgtcttcgtcgtgctcggcttgggagaacaagtccatggcgatccagtccggatcggtctggccgtcgcagaccaccagaatttccgacgggccggcgatcatgtcgataccgacctggccaaacacgtggcgcttggcggtggcgacgtagatgttgcccgggccgacgaccttgtcgaccttcggcacgctttcggtgccataggccagggcggcaaccgcttgtgcgccaccaatggtgaacacacggtcgacaccggcgatgcacgccgcagccagtaccagctcgttgatttcaccgcgcggcgtcggcacgaccatgaccacttccgtcacaccggccactttggccggtatcgcgttcatcagcaccgacgacgggtacgaagccttgccgcccggcacgtacaggccggcacggtccagcggcgtgaccttctggcccagcacggtgccgtcggcctcggtgtagctccaggagtcctgcttctgtttttcgtggtagctgcgcacacgggccgccgcgacctcaagggcttcacgctgaggcgcagtgatgcgcgtcaaggccagctccaggcgttcgcggggcaggatcaggtcggccatggaggcgacgtccaggccgtcgaactgacgggtgaaatccaccagcgccgcgtcaccgcgctcgcgcacggctttgatgatgtcgagcacccgctgattgaccgagtcgtcggacacgctttcccagctcagcagatgatccagatgatgggcgaaatccgggtcggcagcgttgagtcgggcaattgcagtggacgtggtcatagcgagggcctcataggattggcaaaaatgctcaggcgccgaaagttagcagtcgatccgcttgggcacctgagaattctggctatgaggcggatagacgggcgcggctgcttagggccgcgcgggtaggtcaaccgcggtgtcgcgactccactgccgtgcgcagggtgtcgatcaacgcctggatacgggcgtgctgcatcttcatcgaggctttgttgacgatcagccgggagctgatgtcggcaatgaaatcctgaggttccaggccgttggcacgcagggtgttgccggtgtcgaccacgtcgatgatcttgtcggccaggccgatcagcggggccagttccatcgagccgtagagcttgatgatgtcgacctgacggccctgctcggcatagtaacgcttggcaacattgacgaatttggtggctacgcgaagacggcctttgggctcgacgtcaccgacgcggccggcagtcatcagcttgcacagggcgatacgcaggtccagaggctcgtacaggccctggccaccgtactccatcagcacgtctttaccggcgacacccaggtccgccgcgccatgctcaacgtaagttggcacgtcggtagcccgtacgatcagcaggcgaacgtcgtcctgggtcgtggggatgatcagcttgcggctcttgtccggattctcggtcggcacgatgcccgcttcagccagaagcggcaaagtgtcgtcaaggatgcggcccttggacagtgcgatggtcaacatgggaaacgtcagtccttcatcaggctattgctgtccggtcgctaacggcgccagacacagatcgaggccattacagcctcgatttgaaacaaattcacagcaaacctctgtagtgagcgggcttgtcccgcgctgcggtgtggcaggcaaaaccaagctgcctgatacaccgccgcgcggggcaagcccgctcactacagtgctaacgccgggactagcccggtacgcggcggattttcgcgccgagcatctgcagtttttcttcgatgcactcgtaaccacggtctatgtggtaaatgcggtcgatcagcgtgtcgccttcggcgatcagcgccgagatcaccaggctggccgaggcacgcaggtcggtcgccatgactggcgcgcccttgagcttctcggtaccggtaacgatggcggtgttgccttcgacctggatcttggcgcccatgcggtgcagttcgtaaacgtgcatgaagcggttttcgaagatggtctcgatcacggcaccggtgccttcggcaatcgcgttcagggagatgaactgcgcctgcatgtcggtcgggaacgccgggtagggagcggtacgcacgttgacggccttggggcgcttgccgtgcatgttcaactcgatccagtcttcgcccgtggtgatttcggcaccggcttcgcgcagtttttccaggaccgcttccaggatggtcggatcggtgtccttgaccttgactcgcccgccggtgacggcggcggcaaccaggtaggtgccggtttcgatgcggtctggcatcaccttataggtggcagtgtgcaggcgctctacaccatcgatggtgatggtgtcggtgccggcaccggaaaccttggcgcccatggcgttcaggaagttggccaggtcgaccacctcaggctcgcgcgcggcgttttgcaggacgctgcggcctttggccaaggcagcggccatcataatgttctcggtaccggtcacgctgacggtgtcgaagaagaagttcgcaccgcgcaggccgccttccggtgccttggccttgatgtagccgccttcgacgtcgatgaccgcgcccatggcttcaaggccacggatgtgcaggtcaaccggccgcgagccgatagcgcaaccgccaggcagagcaacttcggcttcgccgaaacgggcaaccatcgggcccagcaccaggatcgacgcacgcatggttttcaccaattcgtacggagcaaccagggtcttgatggtgcgcgggtcgatttcgaccgacagcttctcgtcgatcaccggttcgatacccatgcgaccgaacagctcgatcatggtggtgatgtcgtgcaggtgcggcaggttggccacagtcaccggaccatcgcacagcaaggtcgctgcaagaatcggcagggcggagtttttcgcaccggaaatgcggatctcgccatcaagacgggcaccgccggtaataatcaatttatccataagaatctcgacgccttgggggctcaggtgcgctcggcccaggccgcgcggctgaaaaatttcatagtgaccgcatggatgctgccatcggtgatccacgggttcaaatgggcatagatctgctgttgacgcttgaccgggctcaatgccgccagttcatcgctaatcacgttcagctggaagttgcagccttcgccttcaacttctacgttcgtatccggcagctttccttcaaggaagctcttaacttctagggcctgcatgctcaacctctatcggcgccaggtgcgcacgggtcgcacatcatacaaaaaagccccgcgcctgcgaaccccgcatagcaggactctgacggggggcttctttaataatgtgtattaagggtgtgccaacaactcggtcagcccggaaacctcagcaatttcacgcatatcttcaggcaatgcgcgaatgctcaccggtttattgatcgcttgcgcatcgcgcatgaagcacagcagcaacgacaagccgacactgctggacttggtcactgccgagcaatccagcaccagcgccggcgcattgctggcgctgatcaacgcctggccctgcttgcgcaggtcaggcccggagcggtaatcaagcacgccactgaggaataactcaccggcgtcgccaagacgaacagccgactcggtcattgtgcagacttcccggcttccttatcggaagtttccttggccttggccacttcgccagcccaaccattgatggtcttgtccaggtcattgccattgcgttgcatcgcgtcggcgaactgatcacggaacagcttgccaatgttgatgccgttgatgatcacgttacgcagcttccactcgccgttgaccttctccaacgtgtactgcacagggtaaaccgcgccgttattgcctttgacggtcatgttgacgctggtgcgatcacccgactcatccccggcaggagcgacggtaatgccttggttgttgtactccagcaaggcgttgccatagaactggaacaggcctttcttgaagttttcctggaatgtctgcatctgcgcaggcgtagccttgcgcgaatacttgaccgtcatgatgctgcgggaaatgccttcggcatcgaccaccgggccgacaatggtgttcagcgcatcgtagaacttggtcgggtcttgcttgtactgctctttattggcagtcaggtcagccagcatcttgctggttgtgtcctgcaccagatcgtgcgcagaacctgccgcgttggccatcagcggcagcgctgcaagcagtaccagcaggccacgtcgcaaggtagagatcatgaacagattcctcatttggcgtctttattgaccgtattgagcaggaatttaccgatcaggtcttcaagcaccaacgacgactgtgtgtcgtggattgtcgaaccatccttgagcaaggctgtttccccgcccacgctgacgccgatgtacttctcgcccagcagacccgcagtgaggatagatgcagtggagtcagtcggcagattatctaccttcttgtctacctgcatggtcactcgcccggtgaagctgtcacgatccagatcgattgccgtgaccttgccgatggtcacaccggccatggtcactttagctctgacagtcaaaccggcgatattgtcgaagtaggcataaagtttataagtgtcggccgtagggctggccgaaaggccgctgactcgcagggccagcaacagtaaagccaggatgccagccagcaagaaaaggccgacaccgatttccacagtgcggttttgcatcagaaatctccaaacatcaaggcggtcaaaatgaagtcaaggcccagtaccgccagcgaggcgtacacaacggtcttggtggtggcacgactgatcccttctgaagtgggctcacagtcatagccttggaatacggcgatccaggtcactacaaaggcgaaaacgatgctctttatgatgccgttgagcacgtcaccactgaaggtcacgctgttttgcatgttgccccagtaagagccgtcatagacgcccagccagtcaaccgcgacccacgaaccaccccagatacccaccacgctgaagatcatcgccagcagcggcagggaaatgaagccggcccagaggcgcggggcaacaatgtacttgagcgggtccacgccgatcatttccaggctggacaactgctcggtggacttcatgttgccgatttcggcagtcaatgcagaacctgcacggccagcgaacagcaaggccgttacgaccgggccgagttcgcgcaacagcgtcagggcgaccatctggccgaccgcctgctccgaaccgtagctggaaaggatattgaacccctgcaacgccagcaccatgccgatgaaaatcccggaaaccacgatgatgaccagggacataacgccgacagagtgcagttgcttgatcagcaggccaaagccaccgccaataccgccacggcccagcagggcgtgaaacaggaagatcgtcgaacgcccgagcacttcgatcaggtcgatgccggagcgaccgaaaaggcgcaccttctcgagtaaagatttcttgcgcatcagcgcttccccagaagatctgagcggtagtccgctgccggaaagtggaatggcaccgggccatcgggatcgccagtcatgaattggcggatacgcgggttatcggcgttcatcaactcttccggtgtgccctgccccaatacctggccgtcgcccaccacatagaggtagtcggcaatgctggcggtttcggccagatcgtgggagaccacgatgctggtgatccccagcgcatcgttgagcaggcggatcaggcgtaccagcacgcccatggcgatcgggtcctggccgacgaagggctcgtcatacatcaggatctgtgggtccagggcgatggcccgtgcaagcgcaacgcggcgcttcatgccgccagacagttcgtcaggcatcagctcggtcgcaccgcgaaggcccacggcctgcagcttcagaagcacaatgtcacgaatcatttcatcggacagctgggtatgcacccgcagcggaaaagccacgttttcgaaaacatcgaggtcggtaaacagtgcgccgctctggaacagcacgcccatgtgcttgcgcgcatcgaacagatcgctgcgcgacagcgtcggcaggttctggccgttgacccacacttcgccggcgctgggccgcaattgcatgcccatcaggcgcaacagagtggtcttgccgcaaccggaaggccccatgatgcccgtgaccttgccgcggggaatgcgaatatcgacgttattgaagatgctgcgcgtcccgcgcttgaaggtaagacccttcagctcgaccgcgtaggcgttatcggcactcatctaatctccttgggatgcagcctttcactcagacaccatgtttgcgactttcgtttgcaacggatgtgcaatagttaggcacatgggttgggcggaccgaactggcggcgaactatatcactgctgatgcagagcccccaaggccggaacagtgctcgttcagataatggacagggaaaaaaccttgcttgccatgttgcaaatcatgaatctcgcgaccccgcagaataaagcctgacgaacttacgtgagggatttgatcattaccgctataatcgccgacttttcgtcaggctatacgatttcagacatgagccaatccagcgacctcattcaatccgcacaacgtactatccgcctggagcttgaagccgtagaaggcttgctggcccacatcgacgcggatttcgtacgcgcatgcgagatgattctggccagtaaaggccgcgtggtggtggtcggcatgggcaaatccggccacgtcggcaacaagatcgccgccaccctggccagcaccgggaccacggcgtttttcgtgcatccggccgaggccagccacggcgatatgggcatgatcaccaaggatgacatcatcctggcactgtccaactcgggcaccaccaacgaaatcgtgaccttgctgccgctgatcaagcgcctgggcatccagatgatcagcattaccggtaatccggaatcgaccctggccaaggcagccgaagtgaacttgaatgttcacgtggcccacgaagcctgcccgctgaacctggcaccgacctcctctaccactgcggccctggtcatgggtgacgctctggccgtggccttgctggacgcccgcggctttaccgctgaagattttgcattctcacacccgggaggcgccctgggccgccgcctgctgctgaaagtggaaaacgtgatgcacagcggtgatgagctgcccagcgtgcagcgcggcgcattgctcaaggaagccttgatggaaatgagcctcaagcgcctgggcatgaccgccatcctggaagccgatggccgccttgccggtgtattcaccgacggcgacctgcgccgcgccctggaccgcaacctcgacattcaaacggcgaagattgatgaagtcatgacgccgcacggcaagaccgcacgccccgacatgctggcggccgaggctttgaagatcatggaagaccataaaattctggcgctggtcgtagtcgaccgcgacgaccgcccgatcggcgccttgaacatgcacgatttgctgcgtgcgggagtgatgtaaatgaccagcgacctgttgcaacgcggcaaaaacatcaaactggcgattttcgacgtggacggcgtgctgactgacggccgcttgtacttcctcgaggatggcagcgaattcaagactttcaacacgctcgacggccaaggcatcaaaatgctgatggcagccggtgtgcaaacggcgattatcagtggtcgaaagactccggttgtggaacgccgcgcacaaaacctggggattcctcacctgtatcagggccgcgaggataaactggtggtcctggacgagcttcttggtcaactcaacctaagctatgaacaggtcgcctatctgggtgacgacctgcctgacctgccggtgattcgccgggtcggcttgggcatggccgttgcaaacgctgcggctttcgttcgcgaacacgcacatggcaccaccacggcccgtggcggagaaggcgctgcccgcgagttctgcgaattgatcctgcgtgcccagagccgtcttgaagcggctcacgccgcctacctatagagcgttttatgctgagtaaaaagattcgcaacttcctgttattcggggtcattgccgcgctgttcctggcggtgggctactggaatatcagcccggagcgcttcctcgacaagcctgttgcacaggtcgatgcggccgctatcgactattacgcgctcaatgcctacagcgtgcagttcctgccggatggcaagctgcagtacgagatgactgccgaccaaatcgatcacgtgaaatcttccgagatcactttgatgtccagcccgaacatgaaactgtaccgtggcaccgaatttccgtggcacgtcaccagcctgagtggcgaggtcaacccggacggtacccaagtcgaactgatcggctcggtacgtgttgctcgcacagacgacaagaaccgcgacaccattattaccagtagtcgcatgaccgttttcccacaacagcaatatgcgcagaccgagcaagacgttagaatcgacggcgctggcggtgtatcgactggcaagggaatgaaagcgtatttgaaagaaagcaggatacacctgctatcgaacgtaagaggacagtatgaggctcgttaaaactctccctattttgctcggtctgggcgcagcactgggaagcgtgagcgcctgggctctgccgaacgatagccagcaaccgatccacattcaggctgacgatgctcagctggatgacaagcaaggcgttgcaacctacaccggcgccgtgatcatcacccaaggttcgatgaagatcaccggcaacaccgtgaccctcacccgcacgccagctggcgacattgacgtggtgacttcggtgggcaacctggcgtatttcgaacagaagcaagcagctgccgaccctgctccaatgaagggctatggcaagaccatccagtatcacgcccagcagaatcgcatcatcctgattgatcaggccagggttgtcagcagtgatggcaataccactgacggtgaaaagatcacctatgacaccgtgaagcagattgctcaggccggccgcgccaccggcgcgaagatcggcactccgaagccgcgcatcgacatggttatccagccgaagcagaaagacgccgccgcccagcctgcgcctaaacccgctgcgaagaagacgaattaatggcaaccctcaaagcccagcatctggcaaaggcctataaaagccgtcaggtcgtgcgcgacgtcagcctgtcgatcgacagcggccagatcgtcggcttgctcggcccgaacggtgccggcaagaccacttgtttctacatgatcgtcgggctggtgcaggccgatcagggccgagtcctgatcgacgacctggacgtcagccaccaacccatgcacggtcgtgcccgtgcaggtatcggctatcttccccaggaagcgtcgattttccgcaaattgtcggtgtccgacaacatcatggcgatcctggagacgcgcaaggaactcgaccgtgacggccgtcgcaaagagctggaaagcttgctgcaggaatttcacatcaaccacattcgcgacaacctcggtatgagcttgtccggtggtgagcgtcgtcgtgtggagatcgcccgcgccctggctaccgcacccaagttcatcctgctggatgaaccgtttgcgggcgtcgacccgatctcggtgggcgacatcaagcagatcatccaccacctcaaggccaagggcatcggtgtgctgatcaccgaccacaacgtccgtgagaccctcgatatctgtgaaaccgcttatatcgtcaacgatggccagctgattgccgaaggcgattccgccaccatcctggctaacgaactggtcaaggaagtgtacctgggccacgagttccgcctgtaagcattgcgatgtctggccattcgccaaggcgcgcgggagtcaataaaaacctcggtttttttattgttaccgcgctctaggcaaagcacccgatatcaggcatataatttgcttatgtttggcgctcacgcgccctgtcgtggatggcgcattgcgccggcgaataaggtgttaagcccctgccatgaaaccatcgctagtcctgagaatgggccagcagctgacgatgacaccgcagctgcaacaggccatccgcctgctccaattgtcgaccctggacctgcaacaggagatccaggaggccctggagtccaatccgatgctcgaacgccaggaagaaggcgacgacttcgataatgcagacccgctggccgacaacatcgagcaaaaacccaactctgacgtgcaagagccctcctaccaggaaaccgccccaacggtggacaacctcgaggaaggtgaatggaacgagcgcatccccaatgagcttcccgtggacaccgcctgggaagatgtctaccagaccagcgccagcagcctgcccagcaatgatgacgacgagtgggatttcaccacccgcacctccgctggcgagagcctgcaaagccatttgctgtggcagctgaacctggcccccatgtcggacactgatcgcctgatcggcgtcaccttgatcgactgcatcaataaccagggctacctggacgaaaccctcgaagagattcttgaggcattcgatcccgaactggatatcgagctggacgaaatcgaggccgttctgcaccgcatccagcaattcgaacccgccggcattggcgcccgcaccctcagcgaatgcctattgctgcaattgcgccaactgcccgccaaaacgccgtggctcatcgaagcacagcgcctggtcaccgactacatcgacttgctgggcagccgcgactacagccaattgatgcgccgcatgaagctcaaggaagatgacctgcgccaggttatcgagctggtacaaagcctgaacccacgccctggctcgcagatcgagtccagcgaagccgaatatgtcgttcctgatgtgatcgtgcgcaaagacaacgagcgctggctggtggagctgaaccaggagtcggtgccacgcctgcgagtcaacccgcaatatgcaggctttgtgcgccgcgccgatacaagcgccgacaacaccttcatgcgcaaccagttgcaggaagcacgctggttcatcaagagcctgcaaagccgcaacgaaaccctgatgaaagtggccacccagatcgtcgagcaccaacggggctttctggaatatggcgacgaggccatgaaaccgctggttctgcacgacatcgccgaagcagtcggcatgcatgagtcgacgatttcgcgggtaaccacgcaaaaattcatgcataccccacggggtatttatgagttgaaatactttttctccagccacgtcagcacctccgaaggcggcgaatgctcgtccacggccatccgcgcgatcatcaaaaaactggttgccgcggaaaatcagaaaaagccattgagtgacagtaagatcgctggtttactggaggcacaaggcattcaggtcgcccgtcgaaccgtcgccaagtaccgcgagtccctcgggatcgcgccttccagcgagcgtaagcgtttgatgtgacgggcgggccatagcgttccagtggtgggtatttctgcccaccgctttatgcactggcaacgaaggagaagctgtatgcaagtcaacatcagtggacaccatgtagaagtcacccctccattgcgcgaatacgtcgagcagaagctgaaacggcttgagggtcattttgacaagatcaccaatgtgcaagtcatcatgaaggtcgataaacttcagcaaaaaattgaagcgaccctacagatccccggtggcgaagtagtcgccaatgccgagcatgaagacatgtatgcatcaatcgatgccttgactgacaagcttgaccgccaactcaaaaagcataaggaaaagaatctgcacctgatgcaaggtacaggtcgttaactctccccccatgatccgacttgaaaccatcctgacccccggccgttcccttgtgaacgtgccgggcggcagtaaaaagcgcgccctcgaacaaattgccaacctgatcggccgtgaagtgcccgaactggacacgcaagctgtgtatgaagcgcttattgcccgtgaaaaactcggctctaccggttttggcaacggcatagccattcctcactgccgcctgcaaggctgtgaatccccggtgagcgccctgctccacctggatgcccccatcgatttcgacgccatcgacggcgcgccggtcgacctgctctttgttctgctggtcccgcaagctgccaccgatgcacacctggaactgcttcggcagatcgccagcatgctcgaccgcaaggaagtacgcgacaaactgcgcagcgccaaaagcaacgaggcgctctatcaggttgtactggatgaacaaaacgggcagtaatcatgcgtttgatcatcgtcagcggccgttccggctcgggtaaaagcaccgccctcaacgttcttgaggacaatggtttttattgcatcgataacctgcccgctggcctgctgccggaattggcagagcgtgcactcattcataccgaactggcgcaacctctggtcgccgtctcgattgacgcccgcaacctgcccagccatctctcgcgattccccgaattgctcgaagaggtgcgcgccaagcacatccactgcgatgtgctgtatctggacgcagatgaagaaacgctgctcaagcgcttctccgaaacccgccgccgccatcctctgagcagcccacaccgctctctggccgaagccatcgaagacgaaaccacactgcttggcccgatcattgacctcgccgatctcaagatcaacaccaccgggctgaacctctaccagttgcgagacgcgatcaagctgcgcctgctgaaccagccagaacccggcacagcgtttctggtcgagtcgttcggtttcaagcgcgggatgccggtggatgctgacctggtattcgatgtgcgctgcctgcccaatccctattggaagccggagttgcgtgaccagtccgggctggatcagccagtcgccgattaccttgcagcgcagccggatgtggaagaaatgttccaggacatctccagctacctgctcaaatggctgccacgattcgccgcgagcaaccgggcttatgtcaccatagccattggctgcaccggtggtcaccatcgttccgtctacctgactgaacgcctgggccaagtgctccaacaaaccctcaagaacgtccaggtccgccaccgcgaccttagctgaaaggaacaccctcgcgatgcccgctctggaaattgaaatcatcaacaagctgggcctgcacgcccgagcctccgccaagtttgtcggcgttgccggccagttcccctgccagattcgcgccgggcgcacgccggaatccatggtcgatggcaaaagcatcatggccatgatgatgctggccgcaggtaaaggcaccaggattcacttgaagacggaaggcgagcaggaagatgaagccatggccgcgctggtggcgctgatcaataacttctttgatgagggtgagtgaactcaccctttagggcaggtgaagccgcaatggcttcaccccaacgcagtatccatcaccatcattaaacaaaacccgatgcacaaccccaggctggcgagtttttcgtgaccattgcggcgcgattcgggaatcacctcgtgggtcaccaccaacagcatcgcaccggccgcaagcgccaagcccaaaggcagcaacacttcagccaggctcaccaaccaggcgcagagcacggcgaacaccggctcgaccaagcctgaagcggcgccaatcaagaacgccttgacccgcgacatccctgccccagccaataccaacgcgatcaccaagccttccggcacgtcctgcaacgcaatgcccatggccaggctatcggcatccggcattccgccaccggcggaaacacccaccgccataccttccggtatgttgtgggcaatgatggcaaacacgaatagccagatgcgcggcgggatcaccggtttatccggcgtgcccaccaacatttccgggctggcgcccgagaccttgcgatcaaccagatacaagccgaaagccccaagcataatgccgaagctgatcagcccgctggccccccatggcgagagccccaggctttcagcggccgcaatacccggcacgatcaacgaaaaagccgtcgccgcgagcatcacaccggcgccaaagcccagcagggtatcgctcaacgccaccggcatccggcgaatcactagcaccggcaccgcgcccaacgcggtgccgagcgcgcagatcgccccgccttgcaaggcacgcagaatgcgcggttcaagattcagccaggccagcccgtgagccaccagcaatgccgttcccgccaatagcaacagcgagccgaatgcgtagcgaaacattctcccgctgctgatcgccagtgtttcagtgcccatagtcggccttagatcttgttattggagtcaatttcaggccagggcggcctggtagcgtgcagcaacttccggccaattgatgacgctgtaaaaggcgttgatgtattccgggcggcggttttgatacagcaggtaataggcgtgctcccagacatccaggccgaggatcggcgtgttgccgctcatcaacgggctgtcctggttgccgctgctttccaccaccagggtcttttgcggggtgacgctcagccaggcccaaccactgccaaaacgggtcagcgccgccttggtaaaggcgtccttgaagctgtcgtagccgcccagttgctcatcgatggccttggccagtgcgccctcgggtttaccgccaccttttggcgacattaccgcccagaacaaggaatggttggcatggccgccaccttggttgatcaccgctgcgcgcagtttttccggcagttgctggacgctggacaccagtttctctaccggccaccccgcaaactccgtgccctcgaccgctgcgttcaggttattgatgtaggtctggtggtgtttggtgtagtggatctccatggtttgcgcatcaatgtgcggctccagggcgtcgtaggcgtaaggcaatgcaggcaaggtgtaggtcatatcaatgagctccgtaataaggactgttgcgaaccgacgcatccgaatgcgccgcagtgccgcccagcaaacgatgagtacgtgggtactcgccgtgatcgctgatgaaattcagtagttcgacataggtcttgctgctctgacgcaacgccgcttcacgcaattgcgggctcaggcgcgagtcctgcatggtttgcaacaagcgctggtgaatggcgcagaggtattccgcgctctcctcgggctggttcagacgcaggtgcaggtccgccaggttatggtgggaaatgacgcaagccgccactgcttcgtcggcatccgcccagcgctcaaacaacacttgggcgagggccagggcttgcagataagcttcgcgagcatccaccaactcgcccgccatgaagcagcggttagccctttcgatcgtgcgtttccagtgctccatggtgaacctccaaagcagggtcggtgattacacgccgccggcggtgagtttttccggatccagcagggtttccagctggctgcgtgataaatcggtgtcttcaagggcgacgtctatcaccgggcgaccttgcttgtaggccttcttggcgatttcagcggctttttgataaccgatgatcgggttcagtgccgtgaccaggatcgggttgcgcgacagcgcttccttgagcttggcctcattgaccttgaagctggcgatggccttgtcggccagcacacggctggcattggccagcaactcaagactgcccagcaggttctgggcgatgatcggcaacatcacgttcagttcgaaattgcctgactgaccggcgacggtgatcaccgtgtcattgccgatcacctgcgcggcaaccatggcagtggcttccgggatcaccggattaaccttgcccggcatgatcgaagagccgggctgcaacccttccagctcgatttcacccaggccggcaagcggcccggagttcatccaacgcaagtcattggcaattttcatcagcgagacagcagtggctttcaactgcccggaaaccgccacggcagtatcctgggagccgatcaacgcgaatagattcttgcccggggtgaatttcacaccggtcaggctgctgagttgttggctgaaacgtgctgcaaactccggatgtgcattgatcccggtgccgaccgccgtgccgccctgagccagcgcctgcaaagctggcagcaagtcctgcaggtggccgatattggccttgagctgctgcgcccagccattgagcacctggctcatgcgtaccggcatggcgtccatcaggtgcgtgcggccggtcttgatgaacgggtgaacttctttggccttcagctcaatgacttgcaccaggtgcaacaaggccggcagcgtttgctcgtgcaggacaagcgcggcgctgacgtgaatcgtggttggaatgatgtcgttgctgctctggccgcagttcacatggtcattggggttgaccggctcgcccagcaagcgagtggccagggtggcaatcacttcgttggcattcatgtttgagctggtgcctgaaccggtctggaagatatccaccgggaagtgctgcatgaaatcgccttcaagcaacccttgagcggcgtcgacgatggccttgccctgcccttcgctgatttgcttcaggtcgacgttgaccctggcagcggcagttttcgccaggatcaacgcgcgaatgaattgcgccggcatgcgctggtggctgatcggaaaattgttcaccgcgcgctgggtctgggcgccatacagggcttcggcaggcacttgcaactcgcccatgctgtcgcgttcgatacgggtgttactcatcgttagatccttgcaccaagtcagaaacagaaagggaaggcagcaattcgcaggtcgccaattgccaggcaaaggcctgccagcgcttgaggcggcaggcacagtgagaaagttgttccaggtcacgtaacgggcgccaggcctggtccaggcatagggagcgccagtgccagggcaaggcaatgtcgctggcagtatcgaccagcaggcgaaatgaagtttcagcgatcgtccacgggtgggtcgcggtgcaacacgccaggtatcgaccctcattgaggtagtgttcgatcaggcgaggctcattgggatcgaggccgcagcgaatctgacgactcatccagcgccagctttccaggtacggatcctcatgcaggacagaactcatgatccacactcactcggtaatgatatttattattaaatgatattgagaatcaaaacaagagtggcgagttcaaccacctgtggcacggccataaaaaaggcgcgccatctgtaggatggcgcgcctttttttaaagcgtgacggaagactagctgccggcgactgtcatccgctcgatcagcaccgaaccggtgcgaatgttgctgcgcagctccagatcattacctaccgcaacgatctgcttgaacatgtcgcgcatgttgccggcaatagtcacttcctggacggcaaactgaatttcaccattctccacccagaaacccgcggcaccacgagagtaatctccggtgaccatgttcaggccatgccccatcaactcggtaaccagcaagccacggcccatgcgacgcaacaacgccgcctgatcttcgtcaccatgggtcacgaacaggttatgcacgccaccggaattggcggtgcttggcaggccaagcttgcggccggcataagtgccaagcacgtaggacaccagttcgcccttctcgacgaacggcttggcataggtcgccaggccatcaccgtcgaacgccgaactgcccattgcacgcatcaggtgcgggcgctcatcgatggtcagccattctggaaacagcttctggccaatcgccccctccaggaacgaagacttgcggtacaaattgccgccggagatcgccccgaggaaactgccgaacaaaccaccggccagctcggccgaaaacagtaccggcacttcgcacgtcggcaccgggcgtgcgccaagacggcttgcggcgcgctgcgcagcccgttggccaatgctgaccggatcggccagcaattcaccctggcgattcacgtcgtaccagtaatcgcgctgcatctggccattggcttccgcgatcatcacgcagctaaggctgtggcgagttgaagcataaccgccgataaacccgtggctgttgccgtagacgcggcaaccctgatgggtactcaacgtggtgccatcagcgttcttgatgcgcggatcagcgtcgaacgccgccgcttcgcaggccagcgcctgctcaatggcttgctctggggtgatgtcccaggcgtggaacagatcgaaatctttcagatccctggccatcaacgccttgtcggccaaacccgaactttcatcctcagaggtgtgcttggcaattgccaacgcagccgcaacggtctcgcgaatggcttccgggccgctcgccgaagtgctggccgagcctttgcgctgccccacatacagggtgataccaaaaccctggtcgcggttgaattcgacggtttccacttcccgctgacgtaccgacgtcgacagcccctgctccagcgaaaccgccacttcacaggcactggccccctggcgcttggcctctgcaatgatctgctcgacttgttcctgcagtgccggtaacgcttgcggaccgacgctttgggctgcactcatggttttctccactcaaattctgcttacggttaaggccatcgagcgaccgggccggacaagcggcccccgactggttatcatggcggcgtttctttgcggactgccaccatggttgattcttacgacgactccctcgatggggagaaaagcaaaacccaggtcaaacgtgagctgcatgctctggttgaccttggcgagcgccttacaacgctcaagaaagacttgattgcaaaactgccattgaccgacgaaatgcgtcgggcacttgcggacgcgcccaagcacaccgcgaatatcgcgcgtaaacggcacatcatgtttattggcaagctgatgcgcgatcaggatactgacgcgattctggcgttgcttgatcaaaccgatgcctccactcgccagtacaacgaacgcttccataacctggaacgttggcgtgaccgcctgatcgcgggcgatgacgcggtgctggagaaattcgtactggactacccggacgcggaccgccagcaattgcgctccctgatccgtcaggcccagcacgagcaggcgcacaacaaggcgccggccaccagccgtaaaatcttcaagtacatccgtgagctggacgagactcaacgcggactgcgctgatcctcttccccgggtggcggctcccgccacccgaagctccaccgcttacgaccccgtgccacccacggtgatcgcatcaattttcagcgttggctggccgacacccaccggcaccgactgcccatccttgccacacgtgcccacgccactgtccagcgacaggtcgttaccgaccatcgacaccttgctcatagcctcaggcccgttaccaatcaacgtagcccctttgaccggcgcggtaatcttgccgtcttcgatcaggtacgcctcgctcgtggagaacacgaacttgccgctggtgatatccacttggccgccaccgaggttggcgcagtagatgccgcgcttcaccgaagcgatgatttccgccggatcgctttcaccccccagcatgtaggtgttggtcatgcgcggcatcggcagatgcgcataagactctcggcgcccgttacccgtgcgcgccacgcccatcaggcgggcattcagcttgtcttgcatgtagcctttgagcacgccattttcgatcaacgtggtgcactcggtcggcgtaccttcgtcgtcgacactcagcgagccacggcgacccgccaaagtgccgtcatcaacaatggtgcacagcttggacgcaaccatttcacccatgcgcccgctgtaggccgaactgcccttgcggttgaagtcaccttccaggccatggcccaccgcttcgtggagcagcacgccggaccagcccgaaccaagaaccaccggtaaagtgcccgccggcgccggaatagcttccagattgaccagcgcctggcgcaacgcttcacgggcatagcccatcgcgcggtcgtctgtgaggaaataacggtagtcggtacgaccgccgccaccatggccaccgcgctcgcggcggccgttctgctcgacaatcacgctgacgttgaagcgcaccagcggtcgcacatccgccgccagcccaccatcggtggacgccaccaggatgcgttcccacaccccggccatgctcacggtgacttgctggatacgcgggtcgagggcacgcgtggcggcgtcgacacgcttgagcagctcgaccttctcggcacggctgatcacttccagggggttatccggcgcatacaactgggccacgtcctgggtgctgaacgcctgtaccgtgccattttgcccagcacgggagatcgaccgcgcagcacgtgccgccaggcccagggcttccagggtgatcgcgttgctgtaggcaaagccggttttctcaccggattgcgcacgcacgcccacaccttggtcgaggttgaagctgccttccttgacgatgccgtcttccagcgcccaggactcggagatctgcccctggaaatacaggtcggccgcgtcgatacccggcccggccagatcgccaagcacggtttgcaaactttcgatggtcacgccaccgggtgccaggaggtgttcactgactgaggacaacaactcgctcataggtttggccttaaattcatcgttctgaagcaggccgctgtgcgccctgcgagaaaaagcgccgatggttgaccaccggcatgcgcgcccgtatcgacgcctgttcaccgctgtcgcgttcggccaacaacaccgcttcgcctcgatcctgttgtgtcagcacacgcccccaagggtcgacaattgctgcatgcccatgggtttcccgtggccccgggtgtacaccgccctgcgccgcagccagcaggtagcactgggtctcgatggcacgcgcacggatcagcacatcccaatgtgcagcgcccgtcaccgccgtaaaggccgagggtgcggtaatcaattcggctccggctgcacgcaattcgctgtacagctccgggaagcgcaagtcgtagcataccgtcaggcccaggcgccccaccggggtatcggctaccaccacgttgccaccaaaagcatagtcgtcggattcccgataacgacctcgcgcatcggcgacatcgacatcgaacaaatgcagcttgtcgtagcgggcgacgatttcgccatgatcatcgaccagcagcgagcaggcattggacttggcgttcggttggtcctttggcggcagcggcaacgtgccggccactatccataaggtgaggtcacgggcggtctgtttcaaccatggcaggatcgggccctcgcccagggcttcggcgcggccgatatcggccacgtcgcgacggcccatggcggcgaagttctccggcagtactgccagcttcgccccaccggccgccgcttgctccagcaagcgccgggcctgggccaggttggccagcacatcgctctggctgaccatttgaattaccgcaaatgacatgggccgacactccgtaaaaggcatggggccatgctactccacaggctctcagtttggcttttcaaaaggcttgtcgaaggtgatttttggatccttccagggaccttccactttgtattgcacgctggcgaagcgcgaaacacggtcaccgatcagcttgtcgatcaggaacaacgcaccaccgatggcgggcgcccccacaatcaatgcggcaattggcaggttgttggtgaccggcagggtcaccagcaacttggcgtcgacgcggtcagccaccaagtccagggtgccgttgagttcaagattggtcgacggtcccgtcatggtgatgggctcacgcgtcacgaacacgccattgctggctgccagcagacctttgacccggtcatagctcaagcccttgccgagcaagtccgagaagtccaggcgcaggcggcgaccgatggaattgaagttgagcaacccaaacacccgcagggcttgagcgccaccttccacttcaacgaactggcctttgcggaacgcggcatccaggctgccggaaaagcgcttggggccgacccaggccggcgacccaggccaacgaccatccacgtccaggtggaagtcttcgctggtcaccgtcggcgcaaaaccccaacccttcagcacatcggcgatgttcttgccatccaggcggcccttgtaccaactgctgctggaccccggcgccccttcccagccgccggcaccattgagctgcatgcccttgaggccaaggtccaggttattgaaggccaaccccttggcagtcggccggatcttcagcgaccaggcgcctactagatcaggcccctggaacagttggttgattgagatatccagcgccggaatgtccttgggatcaatgtccgccaaaggatccggcgcgttttcatcggcctgtactgtcgggtccaccgctggcaacttcacgtattgcaagttgatcgcaatcggtgcgcctttggcgtccggcaggctcacagtacctttggcttgctggctgtcgagttgcaggccccaggccgcctgcttgcgatcaagctgcaaattgacctgatcaaactgagtgccgaagcccgtcagcttgcccaccttgaagtcggcactgttgagcagttgcttggcactgccgcctggatcgttaccggcatagcggtcgaccagttttttccatggatcaatatccagctccgacagcacaccgcgaatgcgcaaccccttggaggcgggcaacacggcatcaccctcgccaaggaacaactccccacgaccatcattgaacttgtcgggaggcgacgcgaaggtgaagctcgccaactctccgtaatcaaaccagtaacggcgctcggcaccctgtaaggtcatgcggaacacgctatcgcggccctggctggccggcatgccgaaaggtgccggcaagtccactgcaacccccttcaggttggaactgaccatcagttggctgtcggcgccgtcaagggtgagctgcaactggtaagggatatcgccggatactggcaacggctggctgattttcaaccagtccgtcaagcgcttgaccgcgacctggcccttcgcagtaacacgtgtgctgatattgcctggcttaccgtcggcaatgatctgcgcggtgacgggacggtcaaatgcctgggccgaaatgttctggccactcaaccccttggcactgtcaaagcgaaattcgcccttgagctgagacaggtccagggtcggctcggccaattgcaggcgggacttgtcagtttggaagtccaccacgatcctgggttcggtgcctttgaccagcgggatatccagatcgagcttgccctgcaggtcaccgtcgcccttccagccggcgaatgtcgaacccgtaccaatgggcgcttcttgaaggatcttcagaccatcgcccaagccgcccgagaacccgccagtgatcagcaaatggctgtctttgccggcaggcgcatggggaatgttgacgtagacgtccttgaccttggtgtcgagcaattggcccttgctcgccaggatgcgcacgccgctttcttcgacgaacacttcgccattgaccttgctcacatgcggccagcctggctggaatgccaactcggcgtcatgcactttgaagaacaggctgatattgcgtgccgccggcagcgcgtcatggttcagcgagccctggtattggaagaaaccttgatctaccgcgcctttgagaatggccgtgcgcaaccattcgtccagggacgggctcaacaccgcaggcaggtatttgggagtgaagcgaccatcgccatcaaccatgccgacccgcagatccatgtagtcttcctggctatggtcgaaatgcaggcgaatcaggaagtcggccgcaaccttgccttcctcacccagcaccttgatgtagggtgcgatcagcgtgaagccttctttatccagcttccatgtcaggcgcgcattggcctgaatgtactgccagggcttggcgaagatcgggtacagatgcagggaaaaatccttgctgtccatgcgcagctcgccctggcccagatcaccgctgatactgccggagacgttacgcgcggccggtgcgccgaagtaggcgtcgaagccgatgcgctcaaggttggcggcaaagcttacttttcgatcggtagcatcttgaggccggaaatccaccagcacattacgcaggacgccggtggctttcaggtgctcaatggttttggcgaagccttccggcaacggcgccaaagcattcaacaacggcgtgacaggggtcaggtcgaggcgatcggcctgcagcttccagacttcctggtccttgtcggtcgccagggtttgctgcagttgcaggtgcgattcccaacgggtatcaccgatattcatcgccagcgaatcaagctgaaccttgaggccggtcgcactgcgttgcaggtaagcggtgagggccaggttttcgatatgtaccggcttgcggtcggcgtagctgcctttcacctgcggtgagttaaggcgcaccacggcgctttgcacggtgcccctggcccagtccagccagaactcgccgccggccttgaactgtgtgagcttccattgctgggtcagcctggcggggagccatttggcccaatcactctggggcaaactgagataggcctgaacttcaccctctttccattggctggcgcgaatacggctgttcaggctcaaggcaagcggctggccgtcgggcagcgtcaggcgggcgtccaggcgttgccgggtgacgccggtatgcaggctcaaacccacgtaggtgagcgtcaacggcgcttgatcaaacggttgcaaggtcacctggctgtcgagcaacgacacacgcttgaccatctgcatgcgcttgagcaattgctccgggtccaagggctgatcgtcctgcaccggcaggccttgcagcgcccagtggccgtccttgtcttccttcacgctcagttgcaggccgctgacttccaggtgcgcgatgcgcacttcacgcgccatcaagctggcccaaatgtccggtaccacttcaacctggtccaggcgcaaggcattgttgccctcgcccaccatcacgtcatgggccagcaataccggggcaaacccactccagcgcccttcgaggctgccgatttgcagcggcatatccaccgcggcctgagccttggcttctatttcggcgcggtattcagccaccagcgggatcaactcgcgacccaggctcacgtacaccgccgcaagcaccagcaacaacgcacagaggcccaagccccaacgggtcaaagcggcaaaaaagcgtatcagacgctccatgtcaggcgaccctcaaagcagttgacggacggcagatcaacgtcggccgttctcgaagaaagaaagcgatcggggatcagagcagcaccacgtcatattgttcctgggaatacatggtttcgacctggaagcgaatcgtgcgcccgataaaaccttccaattccgcgacgttgccggactcttcatccagcaagcgatcaaccactttctggttggcaagcactctataaccttcagcctggtaggcacgcgcctctcgtaagatttcccggaaaatctcgtagcaaaccgtttccggagtcttcaacttaccgcgcccctggcaactgctgcacggctcgcacagcacttgctcgaggctttcacgggtgcgcttgcgggtcatctgcaccaggcccaattcggtgatgccgatgatattggtcttggcgtgatcgcgttccagctgtttctcgagggtgcgcaatacctggcgttggtgctcttcgtcctccatgtcaatgaagtcgatgatgatgatgccgcccaggttgcgcaggcgcagttggcgggcaatcgccgtggccgcctcgaggttggtcttgaagatagtttcttcaaggttgcgatggccgacgaacgcgccggtgttgacgtcgatggtcgtcatggcttcggccgggtctaccaccaggtagccgccggacttgagcggcactttgcgctccagcgctttctggatttcgtcttcgacgccatacaggtcgaaaatcggccgctcgcccgggtaatgctccaggcggtcggcaatttccggcatcagctcggccacaaactgcgtggtgcgctggaaggtttcccgcgagtcgatgcgaattttttcaatcttagggctgaccaaatcacgcaaggtgcgcagggccaggccaaggtcttcatagatcacgctcggggcgccgatggtcttgatctgtgcgccgatctggtcccacaagcgtcgcaggtaccggatgtccatgaggatttcatcggcgcccgcgccttctgctgcggtacgcaggataaaaccgcccgcctccttgatgccttcggcagccacgcaatcgctgaccaccttcttcaggcgctcgcgttcggcttcatcttcaattttcagggaaatgccaacatgggccgtgcgtggcatgtacaccagatagcgcgaaggtatcgacaattgtgtcgtcagccgcgcgcctttggagccgatggggtccttggtgacttgcaccaccaggctctgcccttcgtgcaccagggcgctgatgctctcgaccgccgggccttcacgcagggaaatttccgaagcatggataaacgcagcgcggtccaggccaatgtcgacaaaagccgcctgcatgcccggcaatacgcgcaccactttgcctttatagatgttgccgacgatccctcgcttttgcgtgcgctcgacgtgcacttcttgcagaacaccgttctctaccaccgccacgcgcgattccatcggcgtgatattgatcagaatctcttcactcatggctgggtctcgttcaggcgttttcacaatagtgaccaatcgcttaaggctgggcgctggggtacggcgttcagcgcgcggtaaggtgttgccaacagggtatgccgaattggcagagcagttgcgcggtttcgcacaccggcaggccgaccacagcggaataactgccattgagcccggcgacaaacaccgagccaagcccctgaatagcatagccgcctgctttatcctgaggttcgccactgtgccagtaggttgtagcctcctcgacagaaataccgcgaaaacgtacgcggctgcttacacatcgcgtttcacaacgctgcccatccgtcagggcaatcgcagtcagcacttcatgctcacgcccggccagcgccatcaacatggccagggcatcggcttgatccacgggtttgcccaggatctgaccatcaacgatgacggccgtgtcggcgcccagcacacatacattgaggtttttttcgagcgcagcaaaacccgccgcggccttgccgcgcgcaaggcgctcgacgtaggcaacagcggattcgtttttaagaggcgtttcatcaatggcggcgctgaccacggtgaagggcacaccgatctgcgtcagcagttcacgccgccttggggagcccgaggccagataaagcgaattcattgcagactctccctgtgacgttcgataaccaggcagagcctcgcaatccattcaattgattttatagcgacgacgtaacccacgcaggccaaaactgacccagggccacagtaatgcactgaccagggctggcaacaccaatgcgagggtaggctggcggttgccggtcaaggcgctgagccacagctgtaccagctgtgccaaaccgaaaatcaccaggatcaccaggcactgctgccacatggggaacatacgcaaacgctgctgcaatgacagcaccaggaacgtaatcagggtgaggatcagcgcgttctgaccgagcaaagtgccatagagcacatcttccgccaagcccaggcacatcgccgtgaccatgccgactttatgcggcaaggtcagcgaccagaatgccagcaacagcgccagccagagcgggcgcaggatttccatgaattgcggcagtggcgaaacactgagcaacaggccgatggcaaacgtcagccaaacgatccagccattacgcgaatgtgtaccggccattattcctccctctgccgcgtggttgccggggcagcggccggaggcttggctgcaggcgtcgtggctgcaggtttagccgccggtttcgctgggcgcgtgctgtgggcggccggtttgaccggggttgccacgggcgctgccgcagtagcgggcggcgccggcggcccgacgaatgccggtttcggcaccgtggccggaataatcggcgtcgtgccgttttgcttgtcttccgcttcctgggcctgggcggcgtcgttggcgcgctcttccggggtgcggttgtcactgaataccagcaacaggtaacggctgcggttcaaggcggcggtcggtacggcgcgcacaatggcaaacggctggccggaatcgtgaatgacttccttgaccgtcgccaccggataacccgccgggaagcgctgacccaggccggaactgaccagcaggtcgccttccttgatgtcggcggtgtcggccacatggcgcaattccaggcgctccgggttaccggtcccgctggcaatcgcgcgcaagccgttgcggttgacctgcaccgggatgctgtgggtcgtgtccgtcagcaataaaacccgcgaggtgtagggcatcaactcgaccacctgccccatcaggccacgggcatcgagcaccggctggccaaggaccacaccgtcgcgctcacccttgttgatgatgatgcgatgggtaaaggggttggggtccatgccgatcaactcggccacttcgaccttctcgttgaccagtgccgaagagttgagcagctcacgcagccgaacgttctgctcggtgagggccgcgagcttttgcatgcgcccctgcaacagcaggttttcagtcttgagtttttcgttctcggcgacaagctcagtgcggctgccgaattggctggccacaccctgatagagccgttgcggcaggtcggtgatccagtaggtctgcatcaacaccagcgacatctggctgcgcacgggcttgagcagtgcaaagcgggcatcgaccaccatcagcgcgaccgaaagcacgaccagcaccaataagcgcacgcccaatgaggggcctttggcgaaaagcggtttaataagccgctcctcccgggcaaatgttctctttattcatacggcatcaaaccggcctggatgcagattgaagaagataaacgccaacaggcagcactgcaaagtgctgcctgccgacgaagcatgtaccgcccaagcgatcttattcgctggagagcaggtccatggtgtgtttatccatcatttccagtgcacgaccaccgccacgggcgacgcaagtcagcgggtcttcggcaacgatcaccggcaagccggtttcctgggccagcaacttgtcgaggtcacgcagcaaggcgccaccaccggtcagcaccaggccacgctcggcgatgtcggaagccagttccggcggcgattgctccagggcgctcttcaccgcctgaacgatggtggccagggactcttgcagagcttccagcacttcgttggagttcagggtgaaggcacgtggaacaccttcggccaggttgcggccgcgaacatcaacttcgcgaacttcgccgcccggataggcagtgccaatttcctgcttgatgcgctcggcggtggattcaccgatcaggctgccgtagttacgacgcacataggtgatgatcgcttcgtcgaagcggtcgccgcccacacgtacggattcggcatacaccacaccattcagggagatcagggcgatttcagtggtaccgccaccgatatccaccaccatcgaaccgcgcgcttcttcaaccggcaggccggcaccgatcgcagcagccattggctcttcgatcaggaacacttcacgggcaccggcgccaagggccgattcacggatggcacgacgctccacctgggtggacttgcatggaacgcagatcagcacacgagggctgggctgcaggaaactgttttcgtgaaccttgttgatgaagtactgcagcatcttctcgcagacgctgaagtcggcgatcacgccgtctttcatcggacgaatggcagcaatattgcctggtgtacggccgagcatgcgcttggcctcggtgccgacggcaacgacacttttctgattaccatgggtccgaatggccacaaccgatggctcattcagaacgataccgcgctcgcgcacgtaaataagggtgttggcagtgcccaggtcaatggaaagatcgctggaaaacatgccacgcagtttcttgaacatggggaaaggaccctaggcaacgcgtgggtaaaaaagtgcggcaaactctaacaacgacagggattttgggcaaggcgccaatgtgctaaattggccgactttctgtgcaccaacccccacaatcgcggccttatgaccgtagaaatgcggtagtgttccgacaatctaacacacggacgccctccgttctgttttccactggagaatcccatggcgcttgaacgctccgacgtggaaaaaatcgcgcatctggcctcgcttggcctgaatgacgccgatcttccacagaccaccgcagccctgaacagcattctcgggctggttgaccaaatgcaggccgtgaataccgacggcatcgagcccttggctcacccgctggaagccagccagcgcctgcgcgctgacgtcgtgaccgagcgcaataatcgcgaggcttaccagtccatcgcaccagcggtcgaaaacggcctgtacctggttccgaaagtcatcgactaaagggaaagagcctttcatgcatcacatgactctggccgagatcgcccgcggtctcgccgacaaaaagttttcttccgaagagctgacccagaccctgctggcgcgcattgccgcgctggaccccaaggtcaacagcttcatcagcctcaccgaagagctggccctgagccaggccaaggccgccgacgtacgtcgcgccaacggtgagaatggcgcactgctgggcgcaccgatcgcccacaaagacctgttctgcacccagggcattcgcaccagttgcggctccaggatgctcgacaacttcaaagcaccctacgacgccaccgtggtgtccaagctggctgccgccggggccgtgaccctgggcaagaccaacatggacgaattcgccatgggttcggccaacgaatcgagctactacggcgcggtgaaaaacccgtggaacctggagcacgtgcccggcggctcgtccggcggttcggctgccgccgttgccgcacgcttcctgccggcggccaccgccaccgacaccggcggttcgatccgccagccagcggcgttcaccaacctcaccggtctgaagccgacctacggtcgagtttcccgttggggcatgatcgcctacgcgtccagcctggatcagggcggcccgctggcacgcaccgctgaagactgcgcaatattgttacaaggtatggccgggttcgataaacaggactccaccagcatcgatgagccggtgccggactacagcgccagcctcacaagctcactcaaaggcctgcgcattggcgtgccgaaagagtatttcagcgccggcctcgacccgcgtatcgccgaactggtgcacaacagcatcaaggaactggaaaagctcggcgcggtgatcaaggaaatcagtctgccaaacaacgcacacgcgattccggcctattacgtgatcgccccggctgaagcctcttccaacctgtcgcgtttcgacggcgtgcgcttcggctatcgctgcgagaacccgaaagacctgaccgacctgtacaaacgctcccgtggcgaaggcttcggggccgaagtacaacgccggatcatggtcggtgcctacgccttatcggccggctactacgacgcgtactacctcaaggcgcaaaaaatccgtcgcctgatcaagaacgacttcatggcagcgtttgaagaagttgacgtgatcctcggcccaaccacgccgaacccggcctggaagattggcgccaagaccggcgacccgatcgccgagtacctggaagacctctacaccatcaccgccaacctcgcgggcttgccgggcttgtccatgcccgccggtttcgtcgatggcctgccggtcggcgtgcaattgctcgccccgtatttccaggaaggccgcctgctcaatgtggcgcaccagtaccagttgaacaccgactggcacacccgcacccctaccggcttctgaggagaacactatgcaatgggaagttgtgatcgggctggagattcatacccagctcgccacccaatcgaagattttctccggtagcgccaccacgtttggctccgagccgaacacccaggccagcctggtcgacctgggcatgcccggcgtgctgccggtgctgaacgaggaagcggtgcgcatggcggtgatgttcggcttggcgattgacgccgagatcggccagcacaacgtgttcgcgcgcaaaaactacttctacccggacctgcccaagggctaccagatcagccagatggaattgccgatcgtcggcaagggctacctggacatcccgctggaagacggcaccatcaaacgtgtcggcgtaacccgtgcgcacctggaagaagacgccggcaagagcctgcacgaagaattcccgggcgcgaccggtatcgacctgaaccgtgccggcacgccgctgttggagatcgtctccgagccggacatgcgcagcgccaaggaagccgtggcctacgtcaagaccatccacgcgctggtgcgctacctgggcatctgcgacggcaacatggccgaaggctcgctgcgttgcgactgcaacgtgtcgatccgtccaaaaggccaggttgagttcggcacccgctgcgagatcaagaacgtcaactcgttccgctttatcgagaaggcgatcaatagtgaagtgcgccgccagatcgaactgatcgaagacggcggcaaggtgatccagcagacccgcctgtacgacccgaacaaagacgaaacccgcgccatgcgcagcaaggaggaagccaacgactaccgttacttccccgacccggacctgttgccggtggtcatcgaggactcgttcctcaacgacgtgcgcgccaccctgccggaattgccgcagcaaaagcgcgagcgtttccaggcggcgttcggcctgtcggtctacgatgccagcgtgctcgcctccagccgtgaacaagccaactacttcgaaaaagtgctgagcattgccggtgacgccaaactggccgccaactgggtaatggttgagctgggcagcctgttgaacaaacagggcctggaaatcgacgaagcaccggtcaccgctgagcaattgggcggcatgttgctgcgcatcaaggacaacaccatctccggcaaaatcgccaagaccgtgtttgaagcgatggccgcaggcgaaggcagtgcggacgagatcatcgagaagcgcggcctcaagcaagtcaccgacagcggcgcgatttcggccgtgctggatgaaatgctcgcggccaatgccgagcaagttgaacaataccgcgcggcggacgaagccaagcgcggcaagatgttcggcttctttgtgggccaggcgatgaaagcttccaaaggcaaagccaacccgcaacaggtgaacgaactgctgaaaagcaagctcgaaggctgacacctgtagggcccggcttctgtgggagccgggcttgcccgcgatgcaggcgcctcggtgctttagtttcaccggggtgatttcatcgcaggcaagccagctcccacatgagccagcttcaacctttgtaacgggggcatcttgaaatgaagcgtctacttggcctcctggccctgttctctctgttggccggttgcgccagcggcctcatcgaccccaacggctacgacgaaaccggcaccgcctcctattacggcgccaagcaccatggcaacaagaccgccagtggtgaacctttcaaccagaacgccctgaccgccgcccatcggcgcctgcctttcggcactcaggtcaaggtgactaacctcgacaacaacaaatccgtggtggtgcgtatcaatgatcgcggcccgcacacccgtgggcgtttgatcgacctatcacgcaaggccgccgagcaactgggtatgctgggcagcggcaccgcgcgggtgcgcgtacaagccatgagcaattaatgagggagccccggccattttcggattaaccgccctttcgccctggagcctgctcgagctgggcagcggcttgctgctgctgatcctgggcgccgaaatcctggtgcgcgccgcggtgcggctggccgccagcctcaaggtgcgcccgctgatcatcggcttgagcatcgtcgccttcggcagcagcgcgccgcagatgactgtcagcctgcaagccaccctcgccggcaataccgatatcgccgtgggcagtgtgatcggcagcagcatcttcaacattctcgtcaccctcggcttgtcggcgctaatcattccgttacgggtgtcacggcaattggtacgcctggatatcccggtgatgatctgcgccggcctgctggtgttcaccctggcggccaatgaagagctgacgcccttcgatgggctggttttgctggtggctttggtggcgtatctcgcggtgctgcattaccagacacgccactcccgccgcccgcgaacgctggacaccgtggccaacgccccctggctgagcagcgtactgctgatactcggcgggctgctggtgctggtcgtggccgggcatttgctgctgggtgcagctgtggatgtggcgagcgacctcggcctgtcggaacgcatcatcggcttgacgctgatcggcgtcggcacctcgctgccgggcctcgccacttcgctgatcgccgccctgcgcggcgagcgcgagattgcggtaggcaacgtgatcggcagcaacctgttcaacctgctcggcgttttggggtttaccgcactggtcgcaccctcgccgctgtcggtgtcgcccaatgcgctggacttcgatttgccggtgatgcttggcgtggtcgtgctgtgcctgccggtgttctacaccggctatcgggtcacgcgcgccgaaggcctgctgttcctcggcctgtacctggcgtatgggctgcatgtggtgtcgtttaccttcggcatgccactggccacaaggcttgaacaattgatgctgtattacgtcctgccagcgctggtggctttcctgttgttcacctcgctgcgagcctggcgccgccaacacaagagggaatcgcaatgaccgatcaaaaaaagcccggggttgaaatgcgtcgccaggtgatgggcgatgtgttcgtcgaccgcgccttgggcaatgccaccgagttcacccagccgctgcaggatttcgtcaatgaacatgcctggggcagtgtgtggaaccgcgaaggcttgccgctgaagacgcgcagcctgatcaccctcgccgccctcacggcgctcaaatgcccgcaggagctgaagggccatgtgcgtggcgcgctgaacaatggctgcacggtggaggagattcgcgaggcgctgttgcattgtgcggtgtacgcgggtgtgccggcggcgattgatgcgtttcgggcggcgcaggaagtgattgaggcgtatcaggcagatcagcagtgactgctcgatagctatcgcagcgatgcggcgacccgacaagccagctcccatactaaatgtgggagctggcttgcctgcgattggcccttaaaaccaccacaacactcagatccagccacccgcctgcaacacaaagatcccgatattggtggtcaccgccgccatcaaggtggtgatcacaataatcgccgccgccaactcatgattgccctcggccgccctggccatcacgaaactcgccgctgccgtcggcgcgccaaagtacagaaacagaatccccaattccggcccgcgaaaacccagcaaccaggcgcccagcgtcgcgaacaccggcaacccgatcatcttcaccaggctcgcactcagggccatgctgccgcttttgcgcaacgccgccagcgacagggtgccgccgatgcagatcaacgccagtggcaaggtcatgtccgccaaatactggccggacgactccagccaaccgggcaggccgattttgaaaatggcgaaaggcgccgccactatcacgctgatgatcagcgggttggccaccacgcttttgaagatgctccatgggtcggacttgatcaccgggctgtacaccgccagcacgatggtcgacagggtgttgtagaacaggatcaccagcgccgcgaggatcgcgccgagggagatgccgtagtcgccatacatgctggcggccagcgccaggccgatcaccccgttattgccgcgaaatgaaccctgggtgtaaataccgcggtcttcacgcgggcaccgaaaaatcgcccagccccaggccagggcaaagctcaacagcgtggcgccggcaaagtagatcagcaggcccggcttgagcgccgagtgcaggtcggcgtggaggatgccgagaaacagcagcgccggcatggtgacgttgaacaccagcgaggacgcgacgtggataaagttgtcgttgatccagttgatgcgcttgagcagcacaccgagaaacagcatggcaaacaccggcgcggtgatggtcagggtggtgaggaagatagccagcatgccggggagaaccttggtgagcgtcgtcaggtggctaatgataagccagtacgagcgggttcgtctgggcaacacggatcaaatgtggggcttgtgtgggagctggcttgcctgcgatagcatcactacggtttgcctgacaaccgaggtgcttgcatcgcaggcaagccagctcccacacaagccagctcccacagggtccgcgtcagtctcaggtgatgggcgccgggttgaacaaggtgatgtcgttgtgcagcttgtgccgctccgcccatgtctgcttcttgccgctggccacatccaggtagaagtgaaacagctcccagcccagctcctcgatgcttgcgcgcccggtagcaatgcgcccggcatcaatgtcgatcaaatccggccaacgctgcgccagctccgtacgcgtcgagaccttcaccaccggcgccatcgccagcccatagggcgtgccacgcccggtggtgaacacatgcaggttcatccccgccgccagttgcaaggtgccacacacaaagtcactggctggcgttgcgcagaagatcaggcctttgcgcttgaagcgctcgcccgggccgagcacgccgttgatcgcactgctgccggatttgacgatagaacccaaggacttctcgacgatgttcgacaacccgcccttcttgttgcccggcgtggtattggcactgcggtccgcctcgcccttggccaggtaacggtcgtaccagtccatttccctgacaagctcctgcgcaacttctttcgtctcggcgcgagaggtcagcaggtaaatcgcgtcgcgtacttcagtcacttcggaaaacatcaccgtcgcccctgcgcgcagcagcaagtccgaggcatagcccagcgccgggttggcggtgatgccggaaaacgcgtcgctgccgccacactgcatgcccaggatcagctcggacgctggcacggtttcacggcggcgctggtcgagtttcttcaagcgcgtctcggccagttccatgatctgctcgatcatctcggtaaagccgtggctggaatcctgcagccggtacagccatggctcactcaagtcgacggagctgtcgttgtcgtgcatcacctgtccggcctgcaatttctcgcagccgaggctgatcaccagcgcttccccgcccaggttcgggttgcgcgccaggttgcgcacggtgcggatcgggatgtaagcgtctgtggccgtaatcgccacgccgcagccgtagctgtgggtcagcgccaccacgtcatcgacgtgcgggtacttgggcagcaactcgtccttgatgcgcttgaccgcgtggtccagcacgccggtgacgcattgcaccgtggtggtgatgccgaggatgttgcgcgtgcccacggtgccgtcggcgttgcgatacccctcgaaggtaaagccctccagcggcgcctgggtttcaggcacttcggtggacagcggcaaactgtcgagtggcggcgcagtgggcatgcgcagttgatcttcctgcacccaactgccgcgcgcaattggcgccagggcgtaaccaatggtctggccgtagcgaataatctgaccgccttcggggatgtcttccagggtcaccttgtggctctgcgggatgaaatccacggtcaccaggccgtccgggaactcagtacccgcaggtactccttggtcattgaccacaatcaccacgttgtcgcgcgggtgcaaacggatcgagcgcggcgagtcggcatgttcaatcaactgcattacatcgtccctcaggaatgcgcttgggtcaggttagtcagctcagggcctttgcttggcggctctttgagcaccacccgtttgatcgggccgacgatgaccacgtagctgaacacggccaagagcgcgttggcgcccacaaacaccagcgcccacttgaacgagccggtggtgctgatgatgtaaccgatcacgatgggcgtactgatcgaggccaggttgccgaacatgttgaacaggccgccactcagcccggcgatttgtttcggcgaggtgtcggacaccaccgcccaacccagtgcgccaacgcctttaccgaagaaggccagggccatgaagcccaccaccatccattcgatatccacatagttgcacgccacaatgctgcacgagatcagcaaccctccaatgatcggcgccttgcgcgcgaaggtcagcgagtggcctttgcgtagcaggtagtcggaaatgatcccgcccaatacgccgccgataaacccgcagatcgccggcagcgaagcaatgaaccccgccttgagaatggtcatgccacgctcttgcaccaggtacaccgggaaccaggtcaggaagaagtaggtgatgccgttgatgcagtactggcccaggtacacaccgagcatcatgcggttggtcagcaactggcggatgtaatcccacttcggcccgtcggttttctggccacgggccttgtcctggtccatatcgaccatcgcgccgttggcggcgatgtggttgaactcggcctcgttgatcatcggatgctggcgcgggctgtggataagtttcagccagatcagcgagaacaaaatgccgatgccgcccatcacgataaacacgtgctgccagccgaaggtgtagacgatccagcccatcagcggcgcaaacaatacggtggcgaagtactgcgcggagttgaagatcgccgacgcggtgccgcgttcggcagtaggaaaccacgccgcaacaatacgggcatttccgggaaacgaaggcgcttcagccaggcccaccaaaaagcgcagcatgaacagcgcgacgatggcggtggagacaccaaactcaccgacataaccttgcagcacggtgaacaaggaccaggtgaagatgctcagggcatagatttttttcgagccaaaccggtcgagcagccagccaccggggatttgcccggccacgtaggcccaaccgaatgcagagaagataaaaccgagggtgaccgcgtcgatgccgaggtctttttgcaggctggagccggcaatcgcgatagtggcccggtcggcgtagttgatcgtggtcaccagaaaaagcatgagcaggatcaaatagcggacgtgagtcggcttggtcgcttgcatgaagatgtactcccactaattattttttttgcgggtgatcatttctgttttgaatgtgggaaccgctttatgtgggagctggcttgcctgcgatggcggtgtatcagtcaatatctctgttactgatgtaccgctatcgcaggcaagccagctcccacagaagccggcgccaactggggcgtttcctacgacccgatgtagctggttttcaccacggtgtagaactcttgcgcatagcgaccctgctcacgcgaaccgtaggacgagcccttacggccaccgaacggcacgtgataatccacaccggcagtcggcaagttgaccatcaccatcccggcctgggagtggcgtttgaagtggttggcgtacttcaacgacgtggtggcaatacctgccgacaaaccaaactcagtgtcgttggccatggccagcgccgcctcgtaatccgccacgcgcaccacgttggcgaccgggccgaagatctcttcacggctgatacgcatggcggcttcgctgtcggcaaacagcgtcggcgccaggtagtagccttcggtatcgcacgtcaccaggccaccaccgctgaccagccgcgcgccttcgctttggccgatgtcgatgtacttgaggtcctggtccaactgggcctgggaaaccaccgggccgatgtcggtgccgctcttgagggcgtggccgaccttgatcgacttcatgcgctcagccatcgccgcgacgaattggtcgtggataccggcggtgacgatcaagcgactcgacgccgtgcaacgctggccggtggagtagaacgcgctctgcacggacaactcgacggcctgcttgaggtcggcgtcgtcgaggatgatctgcgggttcttgccgcccatttccaactgcaccttggcctggcgcgacacacagctgacggcgatctgacgaccgacgcccaccgaaccggtgaagctgatgccgtcgactttcgcgctgttgaccagcacatcgccgaccacgcgaccgctgcccatcaccaggttgaacacaccggccgggaacccggcgcgggagatgatttcagccagggcccaggcacagcccggtaccagttcagcgggcttgatgaccacgcagttgccataggccagggccggggcgattttccaggcggggatggcaatcgggaagttccacggggtgatcaagccgaccacgcccagcgcttcacgggtgacttcaacattgacgcccgggcgcacggacggcacgtagtcgccagacaaccgcaggcattcaccggcgaagaacttgaagatgttaccggcgcgggtcacttcgccgatggcttcgggcagggtcttgccctcttcccgagccagcagggtgccgagttcttcacggcgggcgaggatttcagtgccgactttatccagagaatcatggcgggcctgaatgccggacgtggaccaggcggggaaagcggcgcgtgcggcgtcgatagcggcgttgacttgggcgacatcagccttggcgtattcgccgatcgcatcggaaagctccgacgggttgatgttgacgcaatagtcggcaccggccacccactcgccgttgatgtagttatcaaaacgtttggcttgggacacaaatcttctcctgacgcaaaaggccgctgagcgatcagcggccttgttgataagttactgcggaccttgcttgtcgatcagcgcggccagggcttcatattcttccggcagcaggtcggtcaacggcgtgcgtaccgggcctgcgtcgtagccgacaatttttgcacccgccttgacgatgctcacggcataaccggccttgcggttacggatgtcgaggtaaggcaggaagaagttgtcgatgatcttgccgacagtggcgtgatcgtccttggcaatggcgtggtagaaatccatcgcggttttcggcaggaagttgaacaccgccgaggagtacaccggcacgcccagggccttgtaggcagcggcgtaaacctctgcagtcggcaggccgccgaggtagctgaaacgatcaccgaggcgacgacggatcgacaccatcagctcgatatcacccaggccgtctttgtagccgatcaggttcgggcagcgttcagccaggcgctccagcaatggcgcggtcagccggcagacgttgcggttgtaaaccaccacgccgattttcaccgacttgcacaccgcttccacgtgggcggcgacgccgtcctggctggcttcggtcaggtagtgcggcagcagcagcaggcctttggcgcccaggcgctcggcttcctgggcgtattcgatggcctggcgggtcgaaccgccgacaccggccagaatcggcacgctggtggcgcaagtatcaaccgccgtcttcaccacttgggagtattcgctggcagccagggagaaaaactcaccggtgccgccggcggcgaacagcgcggtggcgccgtaaggggccagccattccagacgcttgatgtagcccgcctggtggaagtcaccctgggcattgaaatcggtcaccgggaaagacagcagaccgtgggaaaggatggacttcagttcttgtggattcattattcgaacaccctgggcgaagactttctgtcgaaaggttgttgttggtttgttgatgtcgtacgtcatcgtacaactataaaaagattcgtcaactgcaattcatcgaccttcatgtttggcgcgacgtttaaatcagacttcttgacgcaggaaattattcctctatgctcgacataactgtatatacatacagttatcaaggaaaatccctacgacatagcaaggagctaacatgtcaggtcttgaactcgctacacctgagaaaaccccgcctaccctgcgctttgaaggtggtgaacacacggcaatcggcgacgacacgctgctgcgtttcgtcaagggcgccccggcgattcctgcgcgacaagtcgagctgcacctgcctaacgggctggcgctgacctatggccaagtcatcgccctgggcggtgacttttacggcattcccggccaacccatcagcgatggcacgtcccctgccgaccgtgtgcaacgcttcaccgccgcgtttaattcgcttgccgtcctgccggcctcgcgggaagaagccggaaaaatcctcgcggtgatgcaaaaggagatcaacgcggtcaatcaggcgatcagggacggcaagcagccccacgaagcctatgacgcgctgggtgatacgttgtcggaagagtggaaccgcatcaccggtggcggcagcgcggtatcggcgctgattccgctggggcgttacttgaaactggcggcggataacgctgatcacttcggcgaatgggcattgtcggcttatctggccggtcatacggccgcgctgcaacaggccgtcgtcgcccatcaaaccggcaccgaccaggcgctcgaactggcctacgccatgaacagcttcgccgatcactttttgaccgacctgttttccgccggccacctgcgcgtgccacgcaaacaactggccgccgtggtcacgccgggggaactgggctcgttgatcagccgcttcatgcacgacgaagacagcaagttcgggctcaaggtacgcaacgccatgggcgaccagtggcatgcctatggcgataaacgctacttcgacagcatcgacgcggacaaccgcgtgcaggtcaaacgtgcggtgcaagcttcggcggatgagattttcgagaccttcctcagcggcgtggcgccctccccggccaacttcaaggcgccgctgtatgtgccggatttgaacgcggcgcaaaacccggcgaataacttttcgccactgttcaagatggacggagacaaggtgctgcgccgcaaggacgtgaatgacctgaacgacaagcactggaccaatgactggtggggatggagtacttacttgctgctcaaggactacaagcccaatcaaccggccggttaagcaggcgcatcactccaggcaatggagatcagctgtgggagctggcttgcctgcgatagcatcaaccgagtctgcctgagataccgaggtgcctgcatcgcaggcaagccagttcccacacaagcccacactagataggcatcactttcaaccgcgctgcgcttctgcctcttcatgggcatggcgcagccgctcacggctgttggtcaagtgcaggcgcatggccgcgcgtgccgcgtccgaatcctggcgggcaatcgcctcgtaaatctcttcgtgttcgcggctcaggcggcccatgtagtgctgctggtcatcatgggccaggcgcgccgaattcaggcgtgtacgcgggatgatgctggtgcccaggtgggtcatgatgtcggtgaagtagcggttgccggtggacagcgcgatttccaggtggaacgcgaagtctgacgcgacggcatcgccagcgtgggctgcactttcattcaacgcgtcgagcgccccacgcatggcagccagttgctcatcgctgcgacgcaaggctgcaagcccggcggactccacttccaggctgatccgcagttccagaattgccagcacatcacgcagcgtcaccacggtggccgggtcaatccggaagccactcgggctcggcgtgtccaacacaaaggtgccgatgccgtgacgggtttccacctgcccggccgcttgcaggcgagaaatggcctcgcgcactacggtgcgactgaccccatgggcatccatgatggccgactcggtgggtagcttatcgccgcgtttgagctgaccgtcacggatttgctcggacaacaccgtgaccaattcctgggcaaggctgcggcgcttgcggggaagacgaggggcggcgctggcgttttccatgatgaatcatctttctcggcgaacttgaggaggcatcatagcccatggcggttgtacgatcaccgttctgacacgactttcatccctatccagcgcgcaaaaaaaatgccccggcacaggccgaggcatttttaaggctcacccgaaggggaaagccgtttacttcaccactttcaggctcggccggccgcttgggcgcggtggctcggaatccggtggcggctggtcatcgccgtcttcgccttcaatcgcttcgtcttcctcgaaaggcgactccagatcaaacaccatgccttggccattctcccgggcatagatgccgagaatggcgccaatcggcacgaacagcgtgtgtggcacaccgccaaaacgcccttcgaagctcaccgcttcgttgtccatgtgcaggtggcgcacagcactgggtgatacgttcagcacgatctgcccatcactggcaaagccctgaggcacgtcaaccttgggaaattcggagttgaccagcatgtgcggggtgcaatcattgtccacaatccactcatagagcgcgcgaaccaaatagggtcgactggagttcatcagcggctccttaagccttagcgcatatcgcgttcgacaccagacagactcgcctggaaagcctcacgcgcaaactggcgctccatgtaatcaagcaacggcttggccggccgcggcagttcaataccgagaatcggcaggcgccagagtatcggtaataggcagcaatccaccaagctttgttcctcactgaggaaaaaaggtttatcggcgaacaaaggcgaaacacccgtcaggctctcgcgcaattccttacgcgcctgcacacgtgccgcttctttactgcgtgaatccagaatcacatccaccagcccgcaccagtcacgctggatccgatggatcagcaagcggctgttggcacgcgccaccgggtacaccggcagcaaaggcggatgcgggtaacgctcatccaggtattccatcaccacggttgactcccacaacgccaggtcgcgatcgaccagggtgggcaagctgccgtaagggttcacttcgatcagtttcggcggctgacggcccgcctccacactgatgatctctgcgctgacacccttctctgcgagcacgatgcgtactcggtgggaatagtggtcggcggggtcggagtaacaggccaaccggttggtcacgcccatggcggtcctcctcgcttgttgaaattatcgaaagctcaaaaacgagcgcgcccagtgagcatccctgcagagcctgatcgatccaggccgctacgtgttcagagatgccgctgggcgcgcaagattaacagcaattgcttacggttggatcaatgcacatccttccagtattcgcgtttgagcagataggcgaatacgaagaagaaagccaggtacagcaagacgtacgtaccgatgcgctggtgctgcagtttgaccgggttggccgagtaggccaggaaggtcaccagatttttcaccgtctggtcgaactgctcttcgttctgcgtaccggtcttgggcacgatggtcaattgatcgcacgcttcatgggtcaaaggcgtaccggtcaacggatcatattgcttcttgccgtcttcaacgacttgaacctgcttgcatcctaccacttggcgcccctgcaggccgaccagaacgtttggcataccgacgttcgggaagactttgttgttcacgccataagggcgcgcggggtcttcatagaaggatttcaggtaaccgtagagccagtcggtgccacgtacgcgggccaccagggtcaggtccggcggcgcggcaccgaaccaggtcttggcgtcggccggttgcatgccgatggtcatgtggtcgccgatcttggcaccggtgaacaccgaatggctgagcatcacgtcatgggggatgcccaggtcgtctgcaacacgttcatagcgctggaatttggcgctgtggcagcccatgcaatagttggtgaacgtgcgcaggccatcctgcatggcggctttgtcggagacgtcgatatcgactttttccagttccgggccatgctcggcggcgaaggacagtagcggcagggccgcaagcatcaatgctacgaataattttttcatcagccagtcaccctttccggtaccggtttggtcttctcgagccgggtgtagaacggcatcagaataaagtaggcgaagtacaggaaggtgcagacctgcgacagcagcgtgcgctcaggggtgggtgccagtacgcccaaaatgcccaggatcacaaacgcgatgcagaacacccacagccagattttgctcagccagcccttgtagcgcatggacttgaccgggctacggtcgagccaaggcagcacgaacagcaccgcaatcgcagcgcccatggcgatcacgcccatcagcttgtcggggatcgcccgcaagatcgcgtagaacggcgtgaagtaccagaccggggcaatgtgctcaggtgtcttgaaggcgttggcctgttcgaagttgggtttctccaggaaataaccgcccatctccgggaaaaagaacacgatcgagcagaacacgaacaagaacacgactacgccgacgatgtctttgacggtgtagtacggatggaacggaatgccgtccagcgggataccgttttcgtccttgtgcttcttgatgtccacgccgtccgggttgttcgaacccacttcgtgcagcgccaggatgtgcagcaccaccaggccgagaatcacgatcggcagggccactacgtgcaacgcaaagaagcggttcagggtgatgccggaaatcaggtagtcaccgcgaatccactgggtcaggtcgttgccgatcaccgggatcgcaccgaacagcgagatgatcacctgggcgccccagtacgacatctgaccccacggcagcaggtagcccatgaaggcttcggccatcagcgccaggtagatcagcatgccaaagacccacaccagctcgcggggcttctggtatgaaccgtagagcaggccacgaaacatgtgcatgtagacgacgatgaaaaacgccgacgcgccggtggagtgcagcaggcgcaggatcgagccgtactcgacgtcacgcatgatgtattcgacggaggcgaacgcctcttctgccgacggggtgtagctcatcgtcagccagacgccggtgacgatctggttgactagcaccagcagcgccagggagccgaagaagtagaagaaattgaagttttttggtgcgtaatatttgctgagatggtcttcccacattttggtggcggggaagcgcgcatccacccaatccatgaacttgctcatcaggctttctccccctcgtcgacgccaatgacaatgacactgtcagtctcgtagtgatgtggcggaactggcaggttcaagggtgcgggttgtgacttgtagacgcggccggccaggtcgtagtgggaaccgtggcatgggcagaagtagccaccgacccaatccttgccaaggtcggcaggagcaacttccgggcggaaggtaggcgagcagcccaggtgggtgcagataccgatcagcagcaggatctctggcttgatcgaacgaacttccttgtcgacgtaagcgggctggtcggaattcttcgagtcggggtcggacagctggccctcgattttcttcagattccccaggatttcctcggtacgacgaacgatgaatacgggctgaccgcgccactcagcaatcatttgctgacctgggtcgatcttgctgacattcaccttcaccggtgcacctgcggctttcgccttggcactgggaaaccatgaccccacgaacgggaccgcagcccccaccgctcctgcagcacccaccacggatgtggctgctaccaagaagcgacgccggcctgcattcacgccgtcattgctcattcagtcctctcccatcagctttttggcctgttaaatcaggcgtctactaagtattgaagctttgcttataaaaattttgtcggatggtaatgaaaagccccacgtatgacaagggaattgcccgggcctccgcccccaggccttgtagtatagggggtctacggatgtggcaagttgtcacgcgcaaatttgtgcataaatcgcaggcaataaaaaacgcccagctccgtgaggaggctgggcgtttttgtggaacgtaaagcgaattaacgcttcgagtactgcggacgcttacgcgctttacgcagaccgactttcttacgttcaacttcacgggcatcgcgagtcacgaagccagctttgcgcagagcgccacgcagggtttcgtcgtactgcatcagagcgcgagtgataccgtggcggattgcgccagcttgaccacttacaccgccaccgataacggtgacgtagatgtcgaacttctcaacggtctcggtcagttccagcggctgacgaactaccatgcgggcagtttcgcggccgaagaaattatccagagtgcggttgttgatcgagatgttaccagtgcccggacgcaggaaaacgcgtgcggttgcggttttgcgacggccagtgccgtaattttgagtcgccgacataatgaactattccgttaaaacttcagttcttggggctgctgagcagcatgagggtgtacagcgcccgcatagactttcagcttgcgaaacatatcgcgacccagtgggcccttaggcagcatgcctttgaccgcgatttcgatcggggcttcaggcttcttggaaatcaggccttcaaagttcgaagacttgataccgcctgggaaaccggagtgacggtagtacattttgtcttgcgctttgttgccggtaacacgtacctgctcagcgttgatgatcacgatgtagtcaccggtgtcaacgtgaggggtgtactcaggcttgtgcttgccacgcagacggctggcgacttcagtggccagacgacccagggtctgaccagcggcgtcgacgacaaaccagtcgcgctgaactgtttccggttttgcagtaaaagttgtcattctttaatagcctcaggggccgccctgtaaattagacggcggatcttactgaatagtgcgtactttgacaagtcaaaggcagccggatacagacgctatcgggggctcgggtcggcgcgtccgttcaacggcaagattcttcggcaggcggcgcatcacttccactgcagaaagaggtgggcaattatgcagattgcgaaaaaaaattcaacctgcttttatgattgttttacccgaaggagtacccgatggattatcgacagctgggccgtacggatctgaacgtgagcgcgatagccttgggcaccatgacctggggcgagcagaacagcgaggcagaggcctttgcacagatcgaacgggccaaagcggcagggatcaacttcctcgacacggcggagatgtacccggtgccgcccaaagccgacacttacgccaccaccgagcgctatatcggtaactacttcaaaagccgcggcgaccgcgccaactgggtcctggccagcaagatcgccggccccggcaacaccatcgactacatccgtgatggccacctgcgccacaaccgcaagcacatcgtggaagccctcgacgccagcctcaaacgcctgcaaaccgactggatcgacctctatcaattgcactggccggaacgcagcaccaacttcttcggccaactgagctacaaacacaaggacgaggacaacctcaccccgctggaagaaaccctcgaagtgctggacgagcaagtgaaggccggcaagatccgccacatcggcctgtccaacgaaaccccgtggggcaccatgaaattcctggcgctggccgaagcccgcggctggacccgcgcggtgtcgatccagaacccctacaacctgctcaaccgcagctttgaagtgggcttggcggaaatcgcaatccgtgaacagtgcggcctgctggcctactcgccgctggcgtttggcatgctcagcggcaaatacgaaggcggcgcacgcccggccaaggcgcgcctgaccgaatacagccgcttcagccgttacttcaacccacagtcggaagcggcgtgcagccgttatgtggcgctggcgcgcgaacacggcctggacccggcgcagatggcgttggcgtttgtgacgcaacagccgtttgtgaccagcaacatcattggggcgacgtcgcttgagcaactggacagcaacattgccagtgctgatttgaaactgtcggccgaagtgttggcagggattgaggcgattcagaaagatcatccgaacccagcgccttgattgatctttagatagctatcgcaggcaagccagctcccacatttgactgtattcaccatgcaaaatgtgggagctggcttgcctgcgatggggccataagcagcactacaaaatcatcaaagcgcccgcgcaatgatctccttcatgatctcattggtccccgcataaatccgctgcacccgggcatccgcccaggcccgggcaatcgggtattcccacatgaaaccgtagccgccgtgcaactgcacgcactcatcgagcaccttgcattgcaggtccgtggcccagtacttggccatcgccgccgtgggcacatccagcttgccctccaggtgcagcgccatgcatttgtcgacgaacacgcgaccaatctgaatttcggtggccatctccgccagcttgaaccgggtattctggaaatccgcaatcgccttgccgaacgccttgcgttcacgggtgtattccagcgtccattccaacgcggcctccgcggatgacacggcgccaatcgccacggtcagacgctcctgcggcagttcctgcatcaaatacgcgaagcccataccggcctggcccaacaggttttccttgggcacgcgtacatcctggaagaacagctcggacgtgtcctgggccttcatgccgaccttctccaggcgcttgcccttgtcgaagcctggcgtatcggcttccaccagaaacaggctggtgcccttggcgccggccttggggtcggtcttggccacaacgatcaccaggtcggcgaggtagccgttggtgatgaaggtcttggagccgttgatcacgtaatcgtcgccgtccagcaccgcagtggtcttgaccccttgcaggtcggaaccggcgccgggctcggtcatcgcaatcgccgtgaccatttcgcccgagatcagtttgggcaaatacttttgcttaagcgcctcactgccgtaatgcaggatgtaaggcgcaacgatatccgaatgcagcgaaaacccgataccggtcagccccaggcggctgatctcttcgatcaccaccgcgctgtacaaaaagtctgcgcccaggccgccatattcttccggcagatgggaacacaacatccccgcttcccccgccttgctccacagcccacggtcgatatagccctgcttttcccattgcccatggaacggcgcggcgtgtttttcgaggaaggtgcgcacgctctcgcgaaagagttcgtgcgaagggctatacaaggttctggggatcatggggcacctgcatggattgtcggacaaggacgagcccacagagcctatgccccgatgccgtcacgggacactggacacatgcgacaaaaaataagacgatccagccgtctggtgaccactttcccctataagaataaatgaaattatgtctaaccaaatctccacgccgttacggcgcgtcagcattttggccattgatcgggtattcgcttcgaccctcatgcaagccaaggatttcttccacctcgccagcctgcgttacggcaagcaacaaggcctgggcctgaccccagcgttcgaaacacgcctggtcagccccgacgggcaatcggtgcgcagcttcagcaatgtgatcatgccggtagacggcggcctggaagatgccgacatcatcgtgctgccggccttctgggacgacttcgacgccctttgcgcccgctacccgcaagtgctgccatggctgcgcgagcaacacgcccgcggcgccgtgctctgcggcgaagccaccggagtattctggctggccgaggccggcttgctcgatggcaaggaggcgaccacctactggcgcttcttcaacacgttcagcgaacgcttccccaacgtccagctcaacgaggacaagcacctcaccgacgccgacaacctttactgcgccggcggcaccacctcggcgtgcgacctctacatttatctgatcgagcgtttctgcggcgccaacatcgcccaggccgtggcccgcgacattctctacgaagtgcagcgcagctatgcgccggggcgcatcgggtttggcgggcagaagctgcaccaggacgtgatcatcctgcagatccagcattggctcgaagaacacttcgccgacaagttccgtttcgaagacgtcgcccgggaacacggcatgagcatccgcaacttcatgcgccgcttccagacggcgacaggcgacaagcccctgcactacctgcaacgcctgcgtatcgagacggccaaaggcctgctctcgggcagccgcaagagcatcaagaccatcagttatgaggtgggttacgacgatgcgagtttctttgcgcggctgttcaggcagcacacggaactgtcgccgaaccagtatcgccagcagtttcagcaggcggcatagcaccgactgtggcgagggagcttgctcccgctggggcgcgcagcggccccaagctcttcagggctgcttcgcagcccagcgggagcaagctccctcgccacagaagccctcccacattttgatttgcagcgcttttagggtttgtgcccgcgtgacaggaattcgtgggactgcatttccagcaagcggctgagcgtgcgctggaattcaaagttcaagcgaccgccggtgtagaggtccttgagctcgacttctgccgagatgatcagcttcacgttacggtcgtagaactcgtcaaccatgttgatgaaacggcgcgcgatgtcgtcggtggtgacgctcatctgctccacaccgctcaagatcaccgcatggaaaatcttgcccagctcgatgtagtcgttctggctgcgcgggccgtcgcacagctggcggaattcaaaccacgccacatcatcgcaggtacgcaatgcgatgatttcgcgattctcgatcatcagcttgtcgttttccaccgccttcgtgcattccggcgtcagcgcgcgaaagcttttcttcaggctgtcatgcgccgcttcgttcagcggaaagtggaacagttcggcttgctccaggtggcgcaggcggtagtcgacgccactgtcaacgttgacgatatcggtgttctgcttgatcagcgcaatggccggcaggaagcgcgcgcgctgcaagccgtccttgtacaaaccgtcgggcacgatgtttgaggtggcaaccagggtcacgccgttcttgaacagttcttccatcaaggtgccgaggatcatggcgtcggtgatgtcggagacgaagaactcatcgaaacagatcacccgcgcttcgtcggagaagcgcttggcgatgagggtcagcgggtttttctcgcccggcagcgtcttcatctcttcgtgcacacgcttcatgaagcggtggaagtgcgtacggaccttttccttgaacggcagcgcttcgaagaaggtgtcgaccaggtaagtcttgccccggccgacgccaccccagaagtacaggcccttgaccggggtgtgatctttcttgccaaacagcttgctgaacatccccggcttgttttgcgaggccgcgaccaggtcgtcgtacaggcgctgcaaatggcgcactgcattttcctgggccgcgtcatggaagaactcagggcgtttcagatcagcttgatatcgttctaggggcgtcataattcgttagcaaggcaacaaaaacgggccgccactgtaacgacggccctgattaatggcaatcaacccttggtcgggttaatcctcggttggagtcaacgcaacgcgcaaggcggcaacggctgtgtcgcgcgacgcttcgtcggcaaacgcggcgctgtcggccactgcggcaccgtccagccatacgctgaagctcaaggcttcggtgcgtacgtccagcgcgtcaccgttttgcagttgcttggttacggcgccagcggctttaccgtcggcaaagttgcgcgacagcagcagttgctcgccatcggcggccaacaggcggaagcggaaactgccgtcatcttcgcgaaagctcacaaagcgcgcagcctttgcagctttcttcttggcggcgaccggagcagcagcctgctcgacgaaggaacgcaggccgacggcttcacgcaactcggcgaggaacggtgcagccacggcacgggctttcttggcgccgatcagcagcaagtcttccatgtccgaggggcgcgacatcaactgatggtaacgctcgcgcgcttcgcccagttggccgtccagcagcgtgaacaagcgagtcttcgcctcgccccagcccaggccttgcaacaactctgcgcgaaactcttcttcctgggctttgctggcaaaggcctggaacaaggtgaacaggtgcgaattgtccgggtccttggcttcgcccggcgcgcgggagtcggtgacgatacgcgagatagcctccttcatgtccttggcgctggtgaacaacgggatggtgttgtcgtagctcttggacatcttgcggccatccaggcccggcaaggtggcgacgctttcttcgatcaacgcctcgggcatggtgaagaattctttaccgttgccgaacaggtggttgaagcgctggccaatgtcgcgggccatttccacgtgctggatctggtcacggccgaccggcaccttgtgcgcgttgaacatcaaaatgtccgctgccatcagcaccgggtagctgtacaggcccatggtgatgcccgcatccgggtcttcgccggcttcgacgttcttgtccaccgaggccttgtacgcgtgggcgcggttgagcaggcccttggcggccacgcaggtcagcagccaggtcagctcggggatctccgggatgtcggactggcggtagaaggttacccggttcacatccaggccaccggccagccaggtcgcagcgatttccatgcgcgagcgctggatgcgctgcgggtcatcgcacttgatcagggcatggtagtcggccaggaagtagaaggagtcggcattggcgtcctggctggcaaggattgccgggcggatcgcaccggcgtagttgcccaggtgcggcgtgccggtggtggtgatgccggtgaggatacgggtacgagtcgtcatgggtaatcgcttatcagactgctatcaattcgagagacgcggcagcaccagatccttgagatcggtgagcttgccatgaaaaaagtgtccgcattctgccactttcagcagctcatgggggcgattcaaggcggcggaccagtcgtagacgagttgcgggtcgaccacttcgtcggtttccggctggatcagggtcaacgggcagccctggggcagcacgtcggtgtcgcgcaggcgcatcacggcggcggcgaccataaacaagtgcgcaagtttttcacccttggcttccaggcggccgccgaggctggcggccacgtagccaccgaaggaaaaaccgagcaaggtgatcggcaggtccgggtgtttttcccgcagccaggtggcagccgcttgcgcatcgtccacttcaccggtagccatgtcgtgggtgccggcgctggcacccacgccgcggtaattgaaacgtaaagtaatcaaaccggcatcgcgcgcagtgcgttgcagggtcgagacaactttattgagcatggtcccaccctgcaccgggttggggtggcagatcagcgccaggccacgtggctcggggtgatccaggtacagggcttccaattggcctaccgggccatcgatcaaaacgggggtttcacgcatgagcaagagatgaactccgtgacctctcaatgggtcgactcgtctagctaaaagtctgtgcatggcatcattgcgagcttaatcgcggtatacagcgcaggtccgagccgttaacgtaaagcaaagccgtttatagaggaaggactcgtggaacactcgctcttagtttggttgttgccgactcttgccctggttgccggtgtcgccattggtttcctggttgcccgcttgctgccgaatgccgcgcctaaccgcacgcagcgtcagctggatgacattcaggaacgttttgacagttatcagaacgaggttgttacccacttcaacagcaccgcgaccctggtcaagaagctcacccagagctaccaggaagtacaggatcacctcgccgatggcgctaaccgcctggccctcgacgacatcacccgccagcgcctgctggccgcgctgcattccgatgcaccgcaagctccacgggaacgcctgaccccgcctcgggaaaatcaggaaccgcctcgggactacgcgccaaaaacgccgaacgcccccggcatgctggatgagcattacggtttgaagaagtaagttttcttcaaacactaaaaagcccggctgatcgatgatcagccgggcttttttctttcagacaacaccggtcaaatgtgggagctggcttgcctgcgatggcggtgtgccagtgacaccgccatcgcgggcaagcccggctcccacagggaccgcatgcgacctcaagccacgggttgttcctgaagcaacccaccctcaatccgcacatgccttccatggaagcgcttgaggctgctgcggtggccgacgctgacaatgctcaaacctggcagctcatcgatcaacgcctgatacaacgaagcctcatcctcttcatccatcgccgacgtggcttcgtccatgtacagccattgcggggcgaacaacagcgcacgcgcaaaggcgaggcgttgctgctcgcccggcgagagcatgcgctgccagtggttggcttcgtccaggcgcgcaaccaggtgcggcaagcggcaggtttccaggacctgtgcataacgttccgccggatagatgctctcgtcctgtggatagctcagcgcggccttcaacgtgccaatcggcaagtaaggtttttgcggcaggaacaggtagcgcgcggccggcagaagaatgctgccgtggccagcgggccacagatgccccatcgcccgcagcagcgtacttttaccgctgcccgagcgcccgctgagcatgacgcgctggccaggctcgacagccatgtcggcgtcggtgagcaggtggcgaccatccgacaggtccatgcccaagccctgcaccaccaggcgttcgccttcaccgcgcacatcaatcgccgcagggcgctgttcattttcgctcatcgcctgctggaagctcagcagacggtcactggtcgcgcgccagcttgccaagtcggaataggcgctgataaaccagctgaagttgccttgaacgttgccgaaggccgagttgatttgcatcagctcgcccaactcgatcttgccggcgaaatagcgtggagccgccacaataaaggcaaagacaatggcgatctgttcgtaaccggcagtgaagaacgtcaggcgcttggacactttcatgatgtcccagtagttctgccagaccttgccgaaccgcgcgctcaaacgctgcttttcattcggctcgccgttgtacagggcgatgctctcggcgttctcacgcacgcgcaccatggagaaacgcaggtcagcttcaaagcgttgttgttggttgctcaggccgatcaagcggcggccaatcaggtgggtcagccagctgccaaccgcggcatacagcaatgcgcaccagaacatatagccgggaatggtgatcccaaacacttcaatgctgcccgacacgccccacaaaatgatcgagaacgacaccaggctgacgacgttgcgcagcagccccaggcccagactcaaggtggtcgaggtgaagttattgaggtcttcggaaatccgctggtccgggttatcggtgtacccgccctgctccagctggtagtagtttttgttgccgagccagcgcgtgaaatgtttttcggtcagccaggcgcgccagcgaatggtcagcatctgggtcaggtacaggcggtacacagcaccaaggatagccacggtggcgatgccacagaaatagccgatcagttgccagaaggccgctgtgtcctttttttccagagcgttgtagaaatccttgtaccagtggttgatccacacggaaatcgccacgctgaacagcgacagtgcaatcaccgccgccagcagcaaccaggccttgcccttctcttcactgcgccaatagggcgtgatcatcgcccaggttcggcgaaagaagtgcccacgcaccgcgtcgttgaccgcggagtactcagcgttctgattcatcgttcaggccctgtaagaaaatgtgacaggcgtttgaaccgatcatagacgatcggttcggggctccgtgcggcctgaagcaaattgttcagtcagtgttcagcgccgtaccgggcgcttctgcagcttgcgctgcaaggtgcggcggtgcatgcccaacgcacgggcagtggcggagatgttgccttcgtgttcggtcagcacgcgctggatgtgttcccactgcaggcggtccaccgacatcgggttttccggcaccagggtgtcgaggtcggcatgctcggaaagcaaggcggccagcacgtcgtcggcgtctgccggcttgcacaggtagttgcaggcgccgcgcttgatcgcctcgacggcggtggcaatgctcgagtaaccggtgaggatcaccacgcgcatttccgggtcgagctcgagcagcttgggcagcaacaccaggccggagtcgccatccattttcaggtcaagcgcggcgtagtccggcaggtcggcctgggcgatggtcaggccttcttcggcagaacctgcggtgctcacgcgaaaaccacggcggctcatggcacgcgccatgacgcgggtaaaagtggcgtcgtcatctaccagcaacaaatgcggcagttcttcgccttcgacttggatctcgtcactcatcgatatctcctcgtgcgacacgtggcaggcgcagctcggtgagcgtaccgccttcctcatgactatagagtttcactgagccgcccgcgcgggtcacgctggccttgctcaaaaacaggcccaggccgaagcctttgcccttggtggtaaagaagggtttgccgatctgctcggcaatggccaacggcacacctgcgccgtggtcacgaatgctgatggtcacgttttccgcgtcccagtccaactgcacgcccaggccttcggggcaggcgtcggcggcattgttcaacaggttgagcagcgcctgggtcaggtccggtggcggtgccatccgcggcacgctgccctggcccaaaagatgaaagcggtaactggcctcgggccgcatcaagtgccagcggttcagggcttcgtcgagccactgggtcacgtcttgcatttctaccgcgaggcggcggttggcttcggcggcgcgcaccagttgctgcaaggtgtgcttgcactgcttgacctgttcctgcagcacgcttaggtcgtcttgcagggccgggtcggggtggtcctggaccatctcattgagcagcacactcatggtcgccagcggcgtacccaattcatgggcggcaccggcggcctgggtggcgacggcgagcagttgctggtcgcgcaggccttcttcacggcgaatggcgcgcaactcttcctggcggcgcagctcttcagccatgcgcgcggcaaagaaggtgatcaccgccgccgacagtgcgaagctcagccacatcccgtaaatctgcaggttttcccgggcgatgggaaacgtctgcaacgggtagaactgcgccagcagcagggtgtacagcgccagcgcgatacccgacaacaccaccgagtagcgccacggcagggttactgcggcaatggtcagtggcaccaggtaataggaaacgaaggggttggtggaaccacccgagaaataaagcaacacactgtgaataaacaggtcgcaggccagttgcagggcgtactccagctcggtcaccggccacgtggtgcgcagccggatagcggtgaacacgcagagcacgatggagaaacagagggtgacacccagttgcagccagggcagtggcagcagatcgaaccagtaggcgagcccgacggaaccggcctgcgcggccagcaccagggtgcgaatgaacgtcaggcgccagaggttttggcgagtggcggaagtcagttttacggcggcgagcatgagctctcccgatgagcgctgcaggcggatcgtcgggagtataaacgaagcagacccgccgccacggcctgtgtggctctttgacgcaggccgggcagatgaccgttcgtcggcatcgccacaacttgtaggtaatgtgtaaacccgaagaacccgatgccaccgtctacagtcataccgaacacgaatacctccaaggagcttacatgtctcgtttcactcgcagtgctgctgttatcaccctcggcgtcgccaccctggccagccttccggcattggccgccgaaggcttgaactacaaccagatttccctgcgcgccgaggtcagccaggaggttgcccgcgacaagatgatcgtgaccctctacaccgagtcccagaacagcgacccggccaagcttgccgctgaaatcaccaacaccatgaacaaggctctcggcgaagcccgcgaagtcaaaggcgtaaccctgcgccagggcagccgtaacagctacccgatctacgacaacaagaaccagaaaatcaccggctggcgtgaacgcgccgagttacgcctggaaagcgcggacttcccggcactgtccaagcttaccggcgagctgctgaacaccctgaaaatggaaaacatggacttcgccattgccgatgccacgcgcaagtccagcgaagatgcgctgctcaaagacgccgtcgccgccttcaaggcccgcgcccaactggccaccgacgcactcggcggcaagggctacaagatcgtcaacctgaacttcaacaccaacggctacccgatgccttacgcgcgcaacggcgggatgatgatgaaagccgccatggccgattcggcgccgacgcctgaagtggaagccggcaccagccaggtcaacatgagcgccgatggcgtgattgaagtgctgatgcagtgacccctacctgacaaacctgaacggcggtaacctcggtgaccgccgttttcgtttgggcagcgtttatatgcctgccacttcaggggtctccatggaaagaatcgccgtcaaaccgctcctcctcgccgcaagcctgctggccttcatgccgatggcccatgccgccagcaccctggtctattgctcggaagccagccccgccggtttcgaccccagccaatacaccagcggcaccgattttgatgcctcggccgaaaccgtgttcaaccgcctgacccagttcaagcgcggcggcaccgaagtcgaacccggcctggccacgagctgggatgtgtcgaaagacggcctgacctacaccttccacttgcgcgatggcgtcaagttccacaccacggatttcttcacacccacccgcgatttcaacgcggatgacgtgctcttcactttcaaccgcctgctggacgccgacagcccgtttcgcaaggcctacccgtccgaatcgccgtacttcaccgacatgggcttgaacaccacgatcaagaatgtcgaaaaaatcgacgagcacaccgtgcgtttcaacctgaacaacgtcgacgcttcctttgtgcagaacctggcgatgagcttcgcctcggtgcaatcggccgaatacgccgcccagctattaaaagaaggcaaggcagaagagatcaaccagaaaccggtgggcaccgggccatttgtgttcaaacgttaccaaaaggactcgcagattcgctacgtcgccaataaacagtattggaaacccgaggacgtgaagctcgacaacctggtgttcgccatcacgcctgacgccgccgcgcgcttgcaaaaactcaaggcgggcgaatgccaggtcagtggctacccgcgcccggcagacatcgagatcatgaagcaggacccgaacctgcgtgtgctgcaacaagccggtttcaacctgggctttctggcctacaacgtgacccacccgccgctggatcaactcaaagtgcgccaggcactggacatggccatcgacaagcctgccatcatcaaggccgtgtaccagagcgccgggcaattggcgcagaacgcactgcctccggcgcagtggtcttatgacccgacgatcaaggacgcgccgtacgacccgaccaaggcgcgggcgctactaaaagaagcaggggttgcaccaggtaccaccatcaatctgtgggcgatgaccgttcagcgcgcctccaatccgaacgcacgcatgtcggcgcagatgatccagcaggactgggaaaaagtcggcatcaaagccaacatcgtcagctatgaatggggtgaatacatcaagcgcgccaaaaatggcgagcatgacgcgatgatttatggctggaccggcgacaacggcgacccggataactggctcggcgtgctctacagttgtgccgcagtcaagggcagcaactacgccaaatggtgtaaccctgcctacgacaaactcgttcaacaagccaaggtcagcaacgaccgcgaccagcgcatcaagtggtatcaacaggcgcaaaaaatccttaaggaacaagtacctataacacctattgcaaactcgacggttttccagccacttcgcaaggaagtgcaggacttcaagatcagcccgtttggcctcacgccgttctacggtgtcagtctagataagtaacaagcgcgccccaaccgagtgcgccagacgcctcggttggtcatttttggtgcgcctcacgcaccgaaaaaagcctctaaatatatgcatttatgtcaaaactttcataaatgcgacattcctgtacgttcgtaccacactttgaccttcgcgacggttcagcatcttgcaatgggtatggcgcctgcataagtatccgcaggccgactcacgaggtcgccctcaccaccaaaaatgacaacaaatcatgaggccaacatgcttaaacacgcagtccttccgttacttgttagcgctggccttatggccgcagctcctttcgcccaagcggcgactaacctggtgttctgctccgaagggagcccggccggttttgacccaggccagtacaccaccggaacagacttcgatgcctcggccgaaaccatgttcaaccgtctgacccagttcgaacgcggcggcaccgctgtgattcctgggctggccaccagctgggacgtgtccccggatggcctgacgtacactttccacctgcgtgatggcgtgaaatttcacaccacctcgtacttcaagccgactcgtaccttcaatgccgatgacgtgctgttcacgttcaaccgcatgatcaacaaggacgatccgttccgtaaggcctaccccactgagttcccgtacttcacggacatggggatggacaccaacatcaagaacatcgagaaagtcgatgaccacaccgtcaagttcacccttggcaccgtggacgccgctttcatccagaacctggcgatgagctttgcctcgatccagtctgccgaatatgcagcgcaactgctcaagagcggcaacgctcaggacatcaaccagaagccaatcggcactggcccgtttgtgttcaagagctaccagaaagactcgaacattcgttacaccggcaacaaggactactggaaacctgaagacgtgaagatcgataacctgatcttcgctatcaccactgacccgtcggtgcgtatccagaagctcaagaaaaacgaatgccagatcaccctgttcccgcgtcctgccgacctcaaggcactgggcgacgacaaggacctgaaactgccgcaccaggccggtttcaacctgggctacatcgcttacaacgtcatgccggttctcaaaggccagaccgccgccaacccactgtctgacctgcgcgttcgtgaagcgctggacatgtcggtgaacaagcagcagatcatcgactccgtgtatcagggcgcaggccaactggccgtcaacgccatgccgccgacccagtggtcctacgacaccaccatcaaggatgccccttacgacgtgaccaaagccaaggcgttgctcaaggaagcgggcgtcaaggaaggcaccgagatcaccctgtgggccatgccggttcaacgcccgtacaacccgaacgccaagctgatggctgaaatgctgcagaacgactggaaacagatcggcctgaaagtgaacatcgtcagctatgagtggggcgagtacatcaagcgttccaaaggcggcgagaaccaggccatgatcattggctggagcggcgacaatggtgacccggacaactggctgaacgtgctgttcggctgcgattcgctggccggtaacaacttctccaaatggtgcgacaagaaattcgacggcatcgtgaaagaagccaaggccacatcggatgtcgccaaacgcaccgagctgtacaagcaggcgcaacatatcctcaaagatgcagtcccgatgacacctatcgcgcactcgacggtgtatcaacccatgcgcaacaccgtgcaggacttcaagatcagcccgtttggcttgaactccttctacggcgtgagcgtcagcggcaagtaaggatcattgacggcgacgtttcataacgtcgccgttattgcatccgcctagaccgtaggaaacagaccacaaacgcaatcattgccgtcctacagcaatgagccgcgccctgtgtatccgttgcctacacggtcagtcagtttcggcgcatttactgcgaagtccacgacccataacgtcgcaggacagcagccgcgcctatctgatgggctcttgctgtgtgggatcagtgatgtttcccaggcttctggcctgggtgattgctcgctgatgacaactacaaacaaggatcgggatcgtcatgcgccataccaccgttctatccgcaatttttggcaccagcctgctggctgtggccacgatgggccaagccgccgagaagaagagcctggtgttctgctccgaaggcagcccggccggctttgacactgcgcagtacaccaccgccaccgacaacgatgcggcggagcctttgtacaaccgcctcgtggagttcgaaaaaggtgcaactaacgtggtgcctgggctggcaaccaagtgggatatttccgaagacggcctgacctacacctttcacctgcgtgaaggggtgaaattccacagcaacaaggaattcaagccgacgcgcgacttcaacgccgacgacgtgctgttcaccttcaaccgcatgcttgaccccgaacacccgtttcgcaaggcctaccccaccgagtttccgtacttcaacgggatgagcctgaacaagaacattgccaaggtcgagaaaaccgacccgcataccgtggtgatgaccctgaacacggttgacgccgcgtttgtacaaaacatcgccatgagctttgcctcgatcctgtcggccgaatacgccgagcagttgctcaaggaaggcaagccgagcgacatcaaccagaagccgatcggtaccggcccgtttgtgttccagcgctaccagaaagactcgcagatccgttttgtgggcaacaaacagtactgggacccgagccgggtcaagctggaccaattgatcttcgccatcaacaccgacgcctcggtgcgtgtgcagaagctcaaggccggcgagtgccagatcaccctgcacccgcgccctgccgacgtcgacgcgctcaaggccgacccgaacctgcaactgctgaccaagcccggttttaacctgggttacatcgcctacaacgtgcgtcacaagcccttcgaccaactcgaagtgcgccaggcgctggacatggcggtgaacaagcaaagcatcctgaatgccgtgtaccaaggcgcggggcaactggctgtcaacgccatgccgccgacccagtggtcttacgacgacaccatcaaggacgcgccctacaacccggaaaaggccaggcaattgctcaaggccgccggcgttaaggaaggcaccgaaatcaccctgtgggcgatgccggtgcagcgcccgtacaaccccaacgccaaactgatggccgagatgctgcaaagcgattgggccaagatcggcctcaaggtcaagatcgtcagctatgagtggggcgaatacatcaagcgcaccaaaaacggtgagcacgatatcagcctcatcggctggaccggcgacaacggtgaccccgacaactggatgggcaccctctacagctgcgacgccatcggcgggaacaactactccatgtggtgcgacccggcgtacgacaagctggtcaagcaagccaaggtcgtcaccgaccgcgaacaaaggactgttctgtacaaacaggcccagcaactgcttaaagcgcaggtgccgatcacgccagtcgcccactcgacggtcaaccaaccgttaagcgccaaagtcgaagggttcaaagtcagccccttcggccgcaacgtgttttcgggcgtcagtctcaacccataagaaaataaccggattgtggagagcgaagtttgctctcccgcaaacgtgcagccttttgctgggaattttcctacggcaaacgtttgcaaaggcttgaacgagttacacacccaatagccggttcacctaaaaagaccggcattaaaaagagaaccaaaggagctccacccatgaaactgagcagcaaagcgcttctggccctggccatcagcagcatcacggcaaccgccttcgctgaaacccaaagccaggacttcgttcctaccacattggccggcaccagcgcccaaagcgaggccaagggctttgtcgatggatttagcctgggcggtacaacccgtaactggttctccaatgaacagcggttccgcggcagtaaattcacctaccagaaacacggcgaagcccgcaccgacgcgtaccgtaccaactgggtgcaaggcaccatcctcaacgccacctcgggctttacccaaggcactgttggcgtgagcacggaagtggcggtctacaacgctctggttctggaccgtagcaagcgcgacatcaagggcggttccaaccgtaccctggctgactccaacggcgacgcagtggatcagtggagcaaactgggcctggccaacgtgaagttccgcgtctcgaacaccacattgaccgccggtcgtcagaacttcagcagcggtatcgtcgacaccatcggcaaccgtgcactgccttcgagctttgaaggtgtgagcttcaacagcgaagaattcagcaacctgtcgttccagggcggcgtgtttgaccgcgtttcgccacggaccgagcagagcctgtcgaaattccgtaccgaatacggcaatggccgtcaggaaaccgacaaggtcagcaccttcggcgtcaactaccagccgttcaagagcctgaaaaccagcctgttcgccgccaacgtggaagacttctggaaccagtactacttcggcgctacccacgagttgggtgacagccagaccctggccctgaccactggcctgaactactacaaaaccgtcgacgaaggcaaaaagttgatgggcaaaatcgacaacgatacctactcgctgtcgcttggcctgactcaccaggctcacagcctgaccttctcgtaccaggcggttaacggtgacgagtacttcgactacctgcacgaaaccaacggcatctacctggccaactccctgacgtccgacttcaacggcccgaacgagaaatccttccagatcgcctacggtctgaacatggccgaatacggcgtaccaggcctgaagttcaacatctactcggctcgcggctggggcatcgacggtactcactacaccggcgacggcggccgtgccggcttcgcttacaacggtatccaggctcaggacggcgagaaacaccaggaatacggcatcggcacgtcctacgccgtgcagagcggcccactcaaggccaccaccattcgtggtacctacgtgactcaccgtgccactgccaaccaggctgacggcaacctccgcgagttccgtctggtcaccaccatcccgttcaacattctttaattagcgccaggtagacggcgggctcatcacgagcccgccgtctacgcttgtctggtttaatcgattgcagagggctctgaatgaaaatgctcccgctacaagccgctgtggccgctgcgctgttgagcgtggcgatcggcgtttcggccaaaccgctggtggtctgcaccgaagccagcccggaaggttttgacccggtcctgtacaccacggcggtcaccgctgacgccgccgctgaaacgatgttcaaccgcctggtggacttcaagcccggtaccaccgaagtgattcccgcactggccaaggccctgccggacatcagcgcggacggcctgacctacacgttccacctgcgtgacgacatcaagttccacaccaccgactacttcaaacccacgcgcaacctgaacgccgacgacgtgctttggagcttccagcgccagctggacccgaatcacccgtggcacaacaagtccaacgtgggctacccgtactttgaaagcatgggcttcaaggaactgctcaaaagcgtcaccaagaccgacgatcacacggttgtcttcacgctgacccgtcctgaagcccctttcctggccgacctggccatggcgttctcttcgattcactccgccgaatacgccgaccagttgctcaagtccggcaagaccgatgacctgaacgccaagccaatcggcaccggcccgttcatcttcacgcgctatgccaaagacgcccaagtgcgtttcaaggccaacccggactacttccgtggcaagccgccggctgacccgctgattctggcgattaccaccgacaacaacgtgcgcctgcaaaagctcaaggccaacgagtgccagatcgcgctgtatccaaaaccggatgacgtgccgagcatgaaggccgacccgaacctgaaagtaacggaattggcggcgatgaccaccgcgtacaccgcgatgaacaccacgcacaagtacatgagtgacgcgcgcgtgcgccacgcgatcaacatcgcgttcgacaagaaaggctacaacgagtcgctgtacggcaaaggcaacgcaatcgacgccactggcccgtacccgccaaccctgctgggtttcagcgacaagctgaaaaacccgccacgtgacctggacaaggcccgtgccttgctcaaggaagccggcgtgccggaaggtaccgaaatcacgctgttcacccgtaacggcggtggcccgaccaaccctaacccgatgctgggcgcccaacgcatgcaggcggatttggcccagattggcctgaaggtcaacatcaaagttatggaatggggcgagatgctcaagcgtgctaaaaacggcgagcacgacatggtttcggccggttgggcgggggataacggtgacccggataacttcctcacaccaaacctgagttgcgatgcagcgaaaaacggcgaaaactacgcgcgctggtgtaacaaagagtttcaagacttgatcgacaaggcacgcgctgacgctgaacccgcccagcgcgctgcactctatgaacaagccatggacgttttcgagaaggaccaaccctggattcccatggcttacccgaaaatgttcaccgccatgcgcaagaacgtcgaaggctttacccaaagccctctgacgaccaataacttcgccaccacccaggtgaagtaataagagaagacgctcggcaccgtcgacattgacggtgccggacctgcctaaccggctgattgaggtacacgacaagatgtttagttttattgcccgccgactggggttactgatccccacgtttttcggcatcacgttgctcacgtttgcgttgattcgcatgatccccggcgaccccgttgaagtcatgatgggcgagcggcgcgtcgaccccgagatgcacgcacaggcaatggaacgccttggccttaacaagccgctgtatgcgcaatacctggactatgtcggcaagctcgcccacggcgacctcggcgaatcgctgcgcacacgcaccagcgtgtggaccgaattcaccgccctcttccccgcgaccctggaactgtccatggccgccctgttgttcgccggtatcctgggcctgttggccggggtgatcgcggccttgaaacgaggatccctgttcgaccatggggtgatgggcatctccctcgcgggatattcgatgccgatcttctggtggggcctgatcctgatcatgttcttctcggtgagcctgggctggaccccggtttccgggcgtatcgacctgctctacgacatcgagccgcgcaccggcttcatgctgatcgacaccctgctggctgacgagccagacgctttcttcgacgccctgcaccacttgatcctgccggccatcgtgctcggcaccatcccgctcgccgtgatcgcgcggatgacccgttcgtcgatgctcgaagtgctgcgtgaagactacatccgtaccgccaaggccaaaggcctgtcgccggcgcgcgtggtgttcgtgcacggcctgcgcaacgcgttgattccggtactgaccgtggtcggcctgcaagtcggcaccctgctggccggtgcggttttgaccgaaaccatcttctcgtggcccggcatcggcaaatggctgatcgaagccattggcgcgcgggactacccggtggtgcaaaacggcatcctgctgatcgcctgcctggtgatcctggtgaacttcgtggtggatatcctctacggcttcgccaacccacgcatccgtcaccagcgctgagatcatgaccatgaccacacctactcaagtgtcagcagtcgatcaaagcctgctgtacccgtccccgtacaaagaattctggcaagccttctccaagaacaaaggcgcggttgccggcctgctgttcatgttgctggtggtgttttgcgcgctgtttgccccttgggtggcaccgcataacccgagcgagcaataccgtgacttcctgctgaccccgccggcttggctggaaggcgggcagatgcagttcctgctcggcaccgacgaattgggccgtgacctgctctcgcgcctgatccagggttcgcgcctgtcgttgctgatcggcttgtcgtcggtggtgatgtcgctgattccgggcatcctgctgggtctgttcgccgggttcttcccgcgcctgcttggcccgaccatcatgcgcttgatggacatcatgctggccctgccgtcgctgctgctggctgtcgccattgtcgcgatcctcggccctggcctgatcaacaccgtgatcgccatcgctatcgtctcgttgccgtcgtatgtccgcctgacccgtgctgcggtgatgggcgaactgaaccgcgactacgtgaccgccgcccgcctcgccggcgccggcctgccgcgcctgatgttcatcaccgtgctgcctaactgcatggcgccgctgatcgttcaggccaccctgagtttctcctcggcgattctcgatgccgcggccctgggcttcctcggccttggcgtacaaccgccaaccccagagtggggcaccatgctggcttcggcccgtgactacatcgaacgcgcctggtgggtagtgagtttgccgggtttgaccattttgctcagcgtgctggcaatcaacttgatgggtgacggcctgcgcgatgcgctggacccgaaactcaagaacgccgcctgaggagattcccatgtcactgttagaaatcaagaatctcaatgtgcgcttcggcgacaagaccgccgtcccggtggtcgatggcctcgacatctccgtcgacaaaggcgaagtactggcgatcgttggcgagtcgggctcgggtaaatccgtgaccatgatggcgctgatgggcctgatcgagcaccccggcatcgtcaccgccgacgcgctgaacttcgacggcaaggacatgctcaagctgagcaaccgccagcgtcgccaaatcgtcggcaaagacctggcgatggtgttccaggacccgatgaccgcgctgaaccccagctacaccgtgggtttccagattgaagaagtgctgcgcctgcacttgaaaatgtccggcaagcaagcgcgcaaacgtgcgatcgaactgctcgaaaaagtggaaatcccgggcgctgccagccgtatggatgcctacccgcaccaactgtccggcggtatgagccagcgtgtggccatcgctatggccattgccggcgagccgaaactgctgatcgccgatgagccgaccaccgcgctggacgtaaccatccaggcgcagattatggaactgctgctggccctgcaaaaagaacagaacatgggcctggtgctgatcactcacgacttggcagttgtggctgaaaccgcccagcgcgtgtgtgtgatgtacgccggccaagccgtggaagtcggccaggtgccgcagttgttcgacattccggcgcacccgtacagcgaagccctgctcaaggcgatccccgagcacagcctgggcgccacgcgcctggccacgctgccgggcatcgttccgggtcgttacgaccgcccgcaaggttgcctgctgtcgccgcgctgcccgtatgtgcaggaaagctgccgtcagacccgcccggggctcgatcctaaatccaacagccttgcgcgctgcttctaccccttgaaccaggaggtggcgtaatggccgtcgttcttaccgcccgcgacctgacccgtcactacgaagtgtcccgcggcctgttcaagggccacgcgctggtacgtgcgcttaatggtgtgtcctttgagctggaagccggcaagaccctcgccgtggtcggcgagtcgggttgcggcaaatccaccctggcccgtgcgctgacgctgattgaagagccgtcctcaggttccttgaaaatcgccggccaggaagtggccggcgccgacaaggcccagcgcaagcaactgcgcaaagacgtgcagatggtgttccagagcccgtatgcctcgttgaacccacggcagaaagtcggtgatcaactcggcgaaccgctgttgatcaataccaacctgtccgccgccgaacgccgcgaaaaagtgcaggcgatgatgaagcaagtgggcctgcgccctgagcattatcagcgttacccgcacatgttctccggtggccagcgccagcggatcgccctggcccgcgcgatgatgctgcagcccaaagtgctggtggcggatgaaccgacctcggcactggacgtgtcgatccaggcccaggtgctcaacctgtttatggacttgcagcaggaattcaacacggcctacgtgttcatctcccacaacctcgcggtggtgcaacacgtcgccgacgacgtgatggtgatgtacctcggccgcccggtggaggtgggccccaaggaagacatctacgcccgcccgctgcacccgtacacccaggcgctgctgtcggccaccccgaccatccacccggacccgaacaagccgaagatcaagatcgtcggcgagctgcctaacccgctgaacccgccacctggctgcgcgttccacaagcgctgcccgtacgcgaccgcgcgttgcagcagcgaggagccgcaactgcgggccctggataaccgccaagtggcttgccactacgcggagcaattcgtggcctgacccgcaaaaaaatgccccggctgataaagcccggggcattgcttgagttctaccgccccgcccgccagattgcgcatcagtccggccggtggggcttttttatgcctcaggtatcgctgtcaccttcaggggtgtcatcgtcatccggcggcgcttgctggtcatcatcatccttgctgccgccctgatcctcatcgccgggttcagcttccgacttggccagttgcaagtgcttgccctgcgccgtctgcactgccgaaaagctcgcctggctgccctgtgccggggtatgcgcccaggccgtcgacatccccaacgacaacagcaccaacacttttatcaacagcactacacgttgaaaaatactcatggtcgatttccgtccagtcagtagatgaatcccgcacgacagccttttaccgtcgccagggtagacgctagtcctaatgccgggtttatgccaggcctcaggtgtcgccgtcgtcgtaggtttcgctgtcctcaccttcgttataagggttttctgcatcctccttcggcgcgggttgggcctggggctgccaactgccggaattgacctcgctttgcttccttttggtgaccgggccggtgtccttccactgaggtgttccggcatccgccagcgccgcagtgcatgtcagccccaggcaccccagcagcaccagatgaatggcgcgttgagttatacgcaagatcgcctcctgatccgtcggtgaatgggtgcaatagtccaaacgctagctcggaagcagggttaacgccaatgctgcgggctgaatgaagatcaaatgtgggagctggcttgcctgcgatggcctcaaccggatgcacctgatgtaccgaggtgccagcatcgcaggcaagccagctcccacagttttagctttttagcgggtatgaaaaagggcgaagccatgacagcttcgccctcttgtgtaccgctcagaccttaatggtgctcgcgggtcgcgcggaatttcacatccggccagcgctcttccatcaatgccaggttaacccgggtcggcgccaggtaggtcaggtgaccaccgccgtccaccgcgaggttttccacggccttgttggagaactcttccagcttcttcttatcgctgcactcgatccagcgcgcggagtacacggtaatcggctcgtaggagcactcaaccttgtattcctctttcaagcggctggcgaccacatcgaactgcagcacaccgacggcgccgagaatgatgtcgttgctgcgctcggggaagaacacctgggtggcaccctcttccgcgagttgctgcaggccctggcgcagttgcttggacttgagcgggtcacgcaggcgtacgcggcggaacagttccggggcgaagtgcgggatgccggtgaagcccaacgcttcgccttcggtgaaggtgtcaccgatctggatggtgccgtggttgtgcagaccgatgatgtcaccggcgaaggcttcttcgagctgttcacgctcggaggagaagaacgtcagggcatcgccgatgcgcacgtccttgccggtgcgcacgtggcgcatcttcatgcctttttcgtatttgccggagcagatgcgcataaaggcgatacggtcacggtgtttggggtccatgttcgcctggatcttgaacacaaaaccggtgaatttctcttcaaccggctccacggtgcgctcgttggcaacacgggccaaaggcttcggtgcccaatcgaccacggcatcgagcacgtggtccacaccgaagttgcccagagcagtaccgaagaacaccggggtcagctggccgtcgaggaactcctgctggttgaactcatggcaggcgccctgcaccaattccaactggtcgacaaaacggtcgtactcgtcacccaggtgggcgcgggcttcgtcggagtcgagtttctcgatgatcttggtttcggtgcgctcgtgaccgtggccggcggtgtagacaatgatgtagtcgtcggccaggtggtacacgcctttgaagtcgcggtagcaaccaatcggccaagtgatcggcgcagccttgatcttcaggacggcttcgatttcgtccaacagttcgatcgggtcgcgaatgtcgcggtcgagtttgttgatgaagctgacgatcggcgtgtcacgcagacggcacacgtccatcagcgcaatggtacgtggctcgacgcctttaccgccgtcgaggaccatcaacgccgagtcgaccgcggtcagggtgcggtaggtgtcttcggagaagtcttcgtggcccggggtgtcgagcaggttgaccatgtggtcgcgatacgggaactgcatgaccgacgtggtaatggaaatacctcgttgtttttccatttccatccaatcggaggtggcatggcggtcggatttgcgggatttcaccgtgccggccacagcgattgccttgcccatcagcaacagcttctcggtgatggtggttttaccggcatcggggtgggaaataatggcgaaagtgcggcgtttcgcgacttcggcggcctggtgggtcatgggaaatcgcctggcaggtgagtcaaaaaagggcggcgagtatagcgcaaaccccgggcgccggaccaccgttcacccgattgggggtggctaaatgctgccaagtgtggaaccttttaaaaggtcgagacgtccactcccctgctaccgcactcggaacaggggctgataaatcagcaagttagcctgacgaggctgcgctcatggctcgatcgcataccgcgttgccggtatcggcgagctgcttttcgcgaccacattcgccgacagccaggaatggcatgtggcgcgtgtggcgagttttgcgtgcccagattcgagcgtcagaagttcatagccaaggcgctgtgacgagtcatagcccgctatggcgaggaacagcaacgcaggatatgagcttctggcgccgaagatgggcgcgcaaaactcgccacacgcgccacctagctcggaaatgtgttcgccgacaaaagaaaaaaggagtccgcctgtggctattcgctatggcaaagggctgataggaggagcggttgtcgtcgcccttctggccctgctggtccactggatcggcatcaacacgatcgaactgtaccgcgacgatttgttgttttacctgcaagctcacttgatcctcgttcttgtctccatgctggctgccctcgttgtagggatcccagccggtatcctgctcagccgcccgaacatggtcgggcgcgcagaacgcttcatgcaaatcttcaatatcggcaacaccgtccctcccctggccgtattggccatcgctctcggcgtcctcggcatcggcagtggcccggccatctttgcgctgttcctcgcctccctcctgcccatcgtgcgcaacacctacgaaggcctgaaaaacgttcagggttccctgaaagaagccgctaccggcatcggcatgacgccgcgccaggtgctgtttcgcgtggaattgcccaacgccgtgccgatcatcatcggcggtgtgcgtgtggccctggcgatcaacgtcggtaccgcaccgttggccttcctgatcggcgccaacagcctgggcagcctgattttccccggcatcgccctgaacaatcagccgcaattgctgctcggcgccgcgtgcaccgcgctgctggccttgctgcttgacggcctggtgaccatggccagccgcctctggctggaacgcgggctgcgtgcgtcttaaagcttggcaaaggaactcacatgaaaaagctgacattgatactgagctgcgtcctgctgttcgcagggtttgcgcaagccgctgaaaaaccggtgatccgcatcggtgcccgagtgttcaccgaacagaccctgctcgccgaaatcacctcccagtacctgcgcaccaagggctacgacacccgcgtgaccggcggcctgggcagcaacctcgcgcgcagtgcccaggaaagcgggcaactggacctgatctgggaatacaccggtgtgtcactggtggcctacaaccatgtggacgagaagctcgatagcgaacagtcctacgcccgagtgaaagaactcgacgcgaaaaaaggcctggtctggctctcgccctcgaagttcagcaacacttacgccctggccctgccggaaaaggtggccgcggaatatcctgaaatcaacagcatcagcgacctcactcaagccatggccgaaaacaccagggaaaaccgcctggtcgccctggacaccgagttcgccaaccgctccgacggcctggccggcatggtcaagctgtacgacatgaacctgacccgcaaaaacactcggcagatggacgctggcctggtctacaccgcgctgcgtaatggccaggtgtttgcaggtttggtctacaccaccgacggtcgcctgaacgccttcaaactgaagctgctggcagacgacaagcattacttcccggactacaccgcagcgcccgtggtgcgccaggtgtatctcgacgcccatccggaattggcggccgacctcaagccactggctgccctgttcgacgacgaaaccatgcgccagttgaatgcgagggtcgacgtcgaccatgaaagcccatccgctgttgccgccgatttcctgcgccaacatccgatcaactgaaaagaggagaagacatggaatttttaaacgccttttcccatcttgattgggctcaggtcctgcacctgacctggcagcacatcaccctggtcggcatcgccgtgatcctggcaatcgccgtcggcgtgcccctgggcgtgctgatgacgcgcttcccaaccctcgccggcccgctgcaggccagcgccacggtgctgctgactgtaccgtccattgcgctcttcggcctgctgctgccgttctactccaagttcggccaaggcctggggccgatgccggcgatcaccgccgtgttcctctactccctgctgccgatcatgcgtaacacctaccttgcactcactggcgtggacgcaggcattcgcgaagctgcacgcggcatcggcatgaccttcggccagcgcctgcgcatggtcgagttgcctatcgcggtgccggtaatcctcgccggtgtgcgcaccgccgtggtgatgaacatcggtgtaatgaccatcgccgccaccatcggcgccggtggcttgggtgtacttattctggctgccatcagccgcagcgacatgtcgatgctgatcgttggcgccgtgctggtcagtcttctggccatcttcgccgacctgcttctgcaatggctgcaacgctcgctgactccaaaaggactgctcaaatgatcgaacttcaaaacctgaccaagacttttcaaagcaacggcaaaacagtgtctgccgtgaacgacgtaagcctgaccgtcaatgaaggcgaaatttgcgtgttcctcggcccgtcgggctgcggcaagagcaccacgctgaaaatgatcaaccgcctgatcaagcccacctcgggcaagattctgatcaatggcgaagacaccaccgacctcgacgaagtaaccctgcgtcgcaacatcggttatgtgatccagcagatcggcctgttcccgaacatgaccatcgaggaaaacatcgtggtcgtgcccaagctgctcggctgggacaaacagaaatgccacgaccgcgcccgcgagttgatgagcatgatcaagctggaacccaagcagtatttgcaccgctacccgcgtgagttgtccggtggccagcaacagcggatcggtgtgatccgcgcgctggcagcggatgcaccgctgttgctgatggacgagccgttcggcgcggtcgacccgatcaaccgcgagatgatccagaacgagttcttcgagatgcaacgcgcgctgaacaagaccgtgatcatggtcagccacgatatcgacgaagccatcaaactgggcgacaagattgcgatcttccgcgccggcaagctgctgcagatcgatcacccggacacgctgctggcccatccggctgacgagttcgtcagcaacttcgtgggccaggacagcacgctcaagcgtctgttgttggtgaaggccgaggatgcagccgacaacgcgccgtcagtgagcccggaaactccagtggccgaggcactggaactgatggacgagcatgaccgccgttatgtggtggtgacctgtgctgaaaacaaggcgctgggctatgtacgacgccgcgacctgcaccgtcagagcggtacctgcggccagtacctgcgcgagttcaacgccacggcggcgtacgacgagcatttgcgcatcctgttgtcgcgcatgtacgagttcaaccgctcgtggttgccggtgatggatgcggagcgagtgttcctcggtgaggtgacgcaggagtcgattgccgagtacctgagttccggtaagtcgcgtgggggcaagaccagtattgtttcgcctgccgagactgcgttggcctgatagaccgctatcgcaggcaagccagctcccacagttgaaatgcatttccctgctggaatgcaattccctgtgggagctggcttgcctgcgatgaaggccccacaaatcccgctgatttgccccatccggggaacatcaatccgtcacaccggtcggttacataagtagctgcacgcggctccgcgacgaacgcgtgcaaaaacgcgacatttttagttgatctcaagcccctcacgccctaaagttcgcgccgaacgtccatgctggaaacgatccatccggctcaagtactgacgacgagacagcaaggccaagggaagcggttattcccatggcctttttgctttcggcgacatgccttgggaagtaggcgaaccaaagtggggatacggaggacgttcatttgcacccattgactaaaacagtttgcccttaggagttcccagcatgtcgatcaacgtcgaagattatttcgcgcgcgccacttttgacaaaatgaaggcgttcgccgacaagcaagaaaccccgttcgtggtgatcgacaccgcgatgatcagccaggcctacgatgacctgcgcgccggtttcgaattcgccaaggtgtattacgcggtcaaggccaacccggctgtcgagatcatcgacctgctcaaagacaagggttcgagcttcgacatcgcctcgatctacgagctggacaaggtcatggaccgtggcgtcagcgccgaccgtatcagctacggcaacaccatcaagaaatccaaggatatccgctacttctacgagaagggcgtgcgcctgttctccaccgactccgaagccgacctgcgcaacatcgccaaggccgcgccgggctcgaaagtgtatgtacggatcctcaccgaaggctcgaccaccgcagactggcctttgtcgcgcaagttcggctgccagaccgacatggccatggacctgctgatcctcgcccgcgacctgggcctggtgccttacggcatctccttccacgtcggttcgcaacagcgcgacatcagcgtgtgggacgcagcgattgccaaggtcaaagtgatcttcgaacgcctgaaagaagaagacggcatccacctgaagctgatcaacatgggcggcggcttcccggccaactacatcacccgcaccaacagcctggagacctatgccgaagaaatcatccgcttcctcaaggaagacttcggcgacgacctgccggaaatcatcctggagccaggccgttcgttgatcgccaacgccggtatcctggtcagcgaagtggtattggtcgcacgtaaatcccgcaccgccgtcgagcgttgggtgtacacggatgtgggcaaattctccggtctgatcgaaaccatggacgaagccatcaagttcccgatctggaccgagaagaaaggcgagatggaagaagtggtcatcgccggcccgacttgcgacagcgccgacatcatgtacgagaactacaagtacggcctgccactgaacctggcgattggtgatcgtctgtactggttgtcgaccggtgcctacaccaccagttacagtgcggttgaattcaatggctttccgccgttgaaatccttctacgtctgaccctgtagaaaccggctgaggcgagggagaaagctccttcgcctcagcctgtgtttacggattcagctgtgtagcgcgcgcctcgtacgcctcggccatcgcgcgaatctgcggatcattcgccgccgccagtgccttttgcgctgttctcaagaacttcaaattccctcccgccaacgccttgcgcagccattccaacgccacatcgacctggcctctgtccgccagcactgctgcataactgaactgcccgcgaaaatcgccgccttcggctgagcgacgataccaatccacggctgcgtccaaatcccttggacaaaaccgaccgtcttccagataacgccccaacaggttcatcgatttggcatggccttgctcggccgcctggcgataaaagctcagcgctcgcgattgatcctctgcaacaccacgcccagtcgcaagcaggttggcgtagttgtatcgcgcccaatccaaccccgcctcagccgccaagcggtatgccttcgccgccgccgcctcatccacagcacacccccagccatgctccaggcaacgcccggccatgttgcgcgccatcagatgcccgccattggcggcaatctgaaaccagcgcaacgccaacgcttcatcacgggaaatgccgcgcccttccagcaggatttgcccgagcagcgcctgggcatccactacgccctctttggccgccaccagaatcgcctgggcggcacgcaccggcgagtcatcgagcatggattgcagttgctcgacgttgagcacttcttcgcggcgcaataaaaaccccatctcagacctcaacccagcgacgcaagaggttgtgataggtgcccgtcagttggatcagcgccgggtggtccggcacatcgcgggtcagttgctggatggcaccgtccatctcgaacagcagcgtgcgctggctgtcttcgcgcaccaggctttgggtccagaagaacgaggcatagcgtgcgccacgggttactgcgttgactttatgcaggctggagccggggtacagcaccatgtcgccggctggaagtttgacgcgttgcaagccgaaggtgtcctggatctccaactcgccgccgtcgtattcctccgggtcgctgaagaacagcgtcgacgacaagtcagtgcgcacccgctcgtggctgccccgggcctggcgcacggcgttgtcgatatgaaagtcgaaactgccgccggcggtgtagcagttcagcaagggcgggaagaccttgtgcggtaacgccgctgacataaacagcgggtttttccacaaccgttccagcatcgccgcgccgatttccttggccagcggatggccttcgggcaattgcaggttgtgtttggccttggccgactggtgcccggcagtgattttaccgtcggcccattcggtgttttccagagcctggcgaatgcgctgcacctcctcgcgagagaacaggccgggaatgtgcagcaacatgggcgatacctgaaatcagagggatgccaatggtattgattcttatccgccctgtaaaacacggcggacgaatgagttcgtaaaaaccgtaaggcaaaagtgtaaagaatgtaaattcctcacgaatagcaatgtatcgcaattgatagaaagtcttgttcgccctatattccgcgccctcacctccttggggaaaggacaactcatgtcgcgcaccatacaaaaaacacctgtcagttcacctcgcatgctggcttcggccatcggcgttgccctcagtgccagctctgccgcccaattggcgcaagcggccgaagacaccgaaccaaaaggccagcgcaacagcatctcccttggcgccaccagcattaccggtgaggcacaggacaacacctcttatcaggtcgaaaaagcctcttcgcagaagtacaccgcgccgctggtagacaccccccgctcggtcaccgtcgtgccgcaacaagtgttgaaagacaccgccgccacctcgttgcaggatgccctgcgcaccgtaccgggcatcaccttcggcgcgggtgaaggcggtaacccccagggcgaccgcccgttcatccggggttttgacgcccagggcgacacctatctggatggcgtgcgcgacaccggcggccagagccgcgagattttcgatattgaatcgattgaagtcagcaaaggcccgaactcgtccttcggcggtcgcggctcagccggcggcagcatcaacctggtcagcaagacgccccaagcgcgcgacttcaccaacggtggcttcacctacggttccgaccagacccggcgctacgtactcgacgtcaaccgtcagttcctcgacgacagtgccgcgttccgcctgaacttgatgagccacgagcaaaacgtggccggccgtgacgtgatcgactacgaccgctggggcgtggcgccatcgctgaccttcggcctgggcacaccgacccgcgtcaacttcagctactaccacgtggaaagcaacgacctgccggattcagggattccgtatggctacagctcgccaacggccactgcacacgtgcatgacaaacccaccgacggcggcgacagcaataacttctacggcctgaaagaccgcgattttcgcaagacccgcgccgacatcagcacgttctcgatcgagcacgacctgaacgacaacatgacgctgaaaaacaccctgcgccacggcagcactggccaggattatgtgctgacccagccagacgacagccagcgcaacgtcaaccgtttcggcaccgtgtggcgccgcgccaatacccgggtttcgaccaccgaaaccacgaccaaccagactgacctgttcggcaacttccagctggcgggcatgaagcactcgtactccaccggcctggaattcaccggcgaagaaacccgcgtcagcggctacaccgtcagcccgaacgccaacccgacctgcaccgtggcaaaaggcagcctgggtggccaatgcacctcgctgagcaacccgacaccggacgacgcctggaccggcagcgtcgcgcgcaactacaacggcaccaacaccaaggccaccagccgagcggcctacgtgttcgacacgattgaactcgacccgaaatggctgctgaacgtcggtttgcgttacgacacctttgatacagaagccaacaccaatgcagtgccgtcgtccacggtggcggcccgcagcaagctcaaggacgacagccagttcttcaactggcaggcgggcctggtctggaagccgctggaaaacggcagcatctacacctcctatgccacctcggcacagcccgttggcggcctggtgggtgaagggcaagaaaccaacggcttcgttaccggcatcaacaccagcgacctgaaacccgaagagaccgtcaactacgagctgggcaccaagtgggacctgttccacaaccgcctgtcgttgactgcagccgtgttccgtaccgagaagaaaaacacgcgaatcctggtggactccaacaccttcgaaaacgccggcgaatcccgtgtcgatggcctggaactgtcggccagcggcaagctcaccgaccaatggcaggtgtttgccggctacagctacctgaaaagcgaactggtcgacccaggcaagatcggtaaccgtcaaaacgtagtgtctgccggctccaacaaaggcaaccagatgcccaacacgccgaagaacaccttcagcctgtggaccacgtatgacatcacgccaaaactgaccgtcggcggcggcgcgttctacgtcgatcaggtttacggcgacccggccaacaccgtctacgtaccggcctacacccgctacgacgccatggccagctacaagttgaccaagaacgtcgacctgcaattgaacgtgcaaaacctgaccgacaagacctactacgacaaagcctacgcggcgcacttcgccaaccaggcagccggtcgtacggccctgttgaccaccagtttccacttctaaacacggccagggttcggccagaagccccacgcatcggatgcgtggggcttttgcgtgttaaacagaatatttctcgttaacccacggcataatgcgcgccgtgactttgatatccagctgagcgaggcggtccgacgtgttgaagaaaaccctgttccagttgcactggttcttcggcattaccgccgggctggtgctggcgttgatggggatcaccggggccacggtctcgtttcaggatgaaattctgcgggcgctcaaccctaccgtcttgagcgtcgaaaaacgtgaagccggcgtgctgccgcctgccgaactggtgcgcaagctcgaagccaccgaaggcaagaccgtcgccatgctctgggtggaaagcgagagcggcaacgccgcgcgcgtgttcttcacggccccgcccggcgagcgtcgtggccagatgcgctacttcgacccctacaccggcgactacatgggcgacgcggtcggccaggacttcttcggctttatcctgcagttccaccgtttcctggtcatgggcgatgtgggccgcaacatcaccggtgcctgcaccctgatcctggtgtttttctgcctgagcggcctgtacctgcgctggccgcgccaagtggcgagctggcgtgcctggctgacgctggactggcgcaaaaaaggccgcagcttcaattgggacctgcactcggtgttcggcacctggtgcctgctgttctaccttttttcggcgctgaccggcctgtattggtcctacgactggtacagccagggcctgaacaaattgatgtccgacgcgccgcaaaacgagcgcgcgcgcaaacgtggccccgcgcccgaaggcccggcgccggtggccaactacgatgcgatctggagcagcatctacagcaacgccggccccgaattgagcgcctacaacatccgcatgccggccgtcgccgggcagccggccattgtgtattacctgctcaaatcatcgccccacgaccgcgcgcaaaaccagatcaacctcgacccggccaccggcgaggtcaagtcccaggaccgctacgccagcaagagcttcacgtcccgcctgctcaccagcatctacgccctgcacaccggcagttacttcggcctgccggggcggatcatcctcaccgtcagttcgttgatgatgccgctgttcttcatcaccggctggctgctgtacctcgaccgtcgtcgcaaaaaacgccaggtgcgcgaggcccgcaaaggcttcggcagccaccagagcaacgcacccgcctggctgatcggcttcgccagccaaagtggtttcgccgaacaactcgcgtggcaaaccgccgggcaattgcaggcggcagggttgccggtgaaagtgcagccgctgggcagcgtcagccaaagtgacttgagccaatcagaaaacgcgctgttcgtggtcagcacgttcggcgatggcgaagcccctgacagcgcccgtggtttcgaacgcagcgtgctcggccaggacctgcccctcaaaggcctgaactactcggtgctggcgctgggtgatcgccaatacgaacatttctgcggctttgcccggcgcctgcatttctggctgacccaccagggcggcaatgcgctgttcgccccggtggaggtcgacagcggcgacaccctggcgttgcagacctggcaacagcaactgggccaactcacaggccacgcacccgcagctgtctggcagcccgcgcagtacgataactggacgctgagccaacgccgtttgctcaaccgcgacagcgtcggcgcagacgtctacttgctgggcctcacaccgccttcgccgcagacctggctggcgggtgacctggtggaaatcctgccgcgcaactgcccgtgggctatcgagcatttcctcgcgggcctcggcctggcaggcagcgacggcgtggtgattgacgacctgccgcaaaccctcaaccaagctttggccactcgccaactgccggacaaccgcgcccatctggtgggcttgcatgctcaagcgctggtcagcgcgctggtgccgttgggcatgcgcgaatactccatcgcctcgattgccagcgatggcgtgctggagctgatcgtgcgccaggaacgccaccccgacggcagcctgggcctggcctccggctggctgaccgaacacgccgccctcggcaccggcatcagcttgcgcctgcgccgcaacagcggtttccacctgccggaggcgcccgtgccgttgattctgctcggcaacggtaccggcctcgccgggttgcgcagcctgctaaaagcgcgcattgccgacggtcagcagcgcaactggctgctgttcggcgaacgcaatatcgcccatgactacctgtgccaggacgagctgcaaggctggctggccagcggtgacctggccctgctggacctggcgttttcccgcgatcaggaagagaaaatctacgtacaggaccgcctgcgtgaatccgccgatgtgctgcgcaaatggctggcggacggcgccgcgatctatgtgtgcggcagtttgcaggggatggcgacgggggtggatcaggcgttgcacgacatcctcggaggcgaagcggtggagcgcttgatcgagcaaggccgttatcggcgggatgtgtactgagcccccataaacaccgaggaacaaaggtgggagctggcttgcctgcgatgcaggcacctcggtgtgtcagtcacaccgcagtgatgctatcgcaggcaagccagctcccacagttttgactgcattccacgtcaggccggctgcagcttttgttcgaacactgacacgccatccaaatcccgcaacaccacggtcaactccgccgtctgcccatcaatctgcacctcgccaaaaaactggaacccggccaacggcgagctgttttgcacggctggcgccttctgaaaaaccacctcgggcccgaacgtcttgtccagctggttcggcccgaaactcccggcattcaacggcccggccacaaactcccagaacggttcgaaatcctgaaacgcggcccggtccgggtgatagtgatgcgccgcgcagtaatgcacatccgccgtcagccacacatggttgcgcacttgttgcgcacgcaagaaagccagcaactcggcaatctccagttcacggccttgcgccgggccggggtcgccgttggcgatggcctcccagcgcggcacaccggggctgacttcgccgtcgggcacgccgaggccgataggcatgtcggcagcgaccactttccactgggcctgtgaggccttgagttcgcgtttgagccagtccagttgctcacggcccataaagggtttttcgccgcccaggttgtcgtcgttggggccgcgatagctgcgcatgtccagcacgaacacatccagcaacgggccataactgagcttgcgataaatccgcccgccaccgtcggccgcctgccggcgcatcggcgaatactccagccacgcctggcgcgcgcggcccaccagggtgttgatgtctttggtctgatagcgctcatcgagctgcttgctcggcgaccagttattcaccacttcgtggtcgtcccactgccagatctgcggcacttcggcattgaagcggcgcacgttgtcatcgagcaggttgtagcggtagttgccgcgatactcatcaagggtttcggcgactttgcttttggcctcggtggtgatgttgcgccagacgcgcccgccctcaaccgtgagctgcgcgggcaccgggccgtcggcgtagatggtgtcgccgctgtggataaagaagtccggcaggcgcaggcgcatggcttcgtagatgcgcatgccgccgatgtccgggttgatgccgaagccctggccgacggtatcgccactccatacaaaccgaatgtcgcggcgctgttgcggcacgctgcgcaagtggccgaaccacggctcgctggcgacaccggtctgggcgtcttcgaaatgcacgcggtagaaaatcgcctggtcggcgggcagcccggtgagttcgacgcgggcggtaaagtccgtgcggttgtcagccagcggcgagatgaatttgcgcgggttgctgaacacgctgcgggtgtcccactccaccaccatccgcgccgggcggtcgctgcggctccagatcatcgcgcggtcgccgagcaggtcgccggactgcacgccatcggtgagttgcgggcggtccttcaccgaagcgatcaccgccggggccaggccaggcagcaacaggccggcgccgacagcttgcatcacacggcggcggccgaggtcgaagtggctcatgcaggttccctcttgagcatcaaaagggaaacttaagcatgggcggatgaagcccatgtgacaccgacctgaagcaagaaggagatcaaatgtgggagctggcttgcctgcgatacaggcaccgcggtgtttcagtcacaccccagtgatgcaatcgcaggcaagccagctcccacattgttaggccgtgactggcagctccaccgcctccgggcgcttgatcagcgcatacaccaaaccggtcactaggctgccggccacaatcgccagcaagtacagcagcgcatggttcatcgcattcggaatgatcagcacaaacaacccaccgtgcggcgcggcgagcttgcagccgaagtacatcgacagcgcccccgtcagcgcaccaccggcgatgctggccgggatcacccgcagcgggtctttggcggcaaacggaatggcgccttcggagataaagcacaggccgagaatcatcgccgctttgccggcctcgcgttcggtctgggcaaacttgcgccgggcaaggaacgtggcgatgcccatgccgatcggcggcaccattcccgccgccatggttgccgccatcggcgcaccgctggaggcggccagcaaaccgacggaaaacgcatacgcagccttgttgatcgggccgcccaaatccacacacatcatgccgccgagcaagatccccagcagcactgcattggtggtgcccatggtgctgagaaaatccgtcagcccggtgagcaggcgtgcgaccggaggcccgaccagatagatcattgccaggccggtgaacaaactcgccagcaacggaatgatcaggatcggcttcaacgcctcgaggctctgcggcaacttcactgcgcgggtgatcagcttgacgcagtagccggcgaggaaaccggcgaagatgccgccgataaagccagcccccaacgtccccgccagcagcccgccgatcatgccgggcgcaatgccgggccggtcggcaatcgagtaagcgatatagcctgcgagcaacggcaccatcagcatgaaggcctgatcgccgacggttttgagcgccgccgccagcgtgcccttttcctcaaacgcatgaatcccgaacacgaatgacagggcgatcaacaacccgcccgccaccaccattggcaacatgaacgacacgccggtgagcaggtgtttgtacacgccggttttttctgacttcttcgccaccgctgcgccggttgcactttccactgcaccgtcggccagggccttgttgagggtcgcttcggattgtttgagggcgatgccggtgccgcaacggtagatcttcttgccggcgaagcgctcggtggccacttcaatatcggccgccagcaacaccacatcagcgtcagcgatggcttgcgcgctcaacggcgtgcgggcgcccaccgagccctgggtctcgacctgcaagtcgtagcccaggcgtttggcggtttgctgcaaggcttcggcggccatgaaggtatgcgccacgcccgtcgggcacgcggtaatcgcgacgatacgcggggcattcttcgcaaccaccggcgcttcactggcgacatacacctgggcttcttcggcgccccgacgcagcaccgcatcgacatccgccagcgcgtgtgcgggtgtactgtggaacacacgcttgccgacaaaccggagcatgtcgacccgcgtgctgctgaccagcaacacccattcggcatcgtcgagggtggcctgggacaactggcgctccgggcgctgcgcgtccaccacttcgacgctggtgctccacccttggcgctgcgcggcggcgtccaacaagcgggcgcacagcacactggtaaccatgccgttcgggcaggcggtaacaatggctaacttcatcacaaaccctcttattgttctgtcagcgcgcgcacgcggacgccgctttcgagacgcgccagctgcacgtcatcgctgatgccgaaaccgatttgcgtcaccgccatggcggcaatcgccgtggcgcggcgcagggtctgctcgggcgtatcgccagcgagcaagccgtgaagcattccagccaagagtgaatcgcctgcgcccacagtgctggcgaccgtgacctctggcggcgtggcctgcagcgcaacacccgggctgtaccaggtcacacccgcagcgccatcggagaccaccacatgctccacgccctgctgatgcaggcggtggatggcgtctttggaggtgcccaagacctcggcgagttcttcggtattgggtttgaccagccacgggccggcttgcaaacccgcgcgcaaggcgtcgccactggtgtccagggcgactttcaaacccaggcctttgattttttccagcaagccctgaaaccactgagggctgacacctcgcggcaggctgccggccaccaccaccgcatcgaattcagggccgacgatggcgatgagtttgagcatttcatcttgcgcctcttcatcgaccagcggccccggcgcattgatgtcggtgacccggccatccctctcggcaatcttgatattgctgcgcgtctcgccgggcacgcgaatgaacgcattgccaaacttgcggcgggcgatcaacgcgtcgaaagcctgggggttttcatcaccgagaaaaccgcccacgctgacgttatgccccagatccgccaatacctgcgccacattcacacccttgccggcggcatgggtcagcacggtttcactgcggttgacttcaccgggttcaagacggcccaggcgtacggtcaggtccaacgccgggttcagcgtcaggcataaaatgttcgccatttacacggcctccacaagagcacgcacttcggcgggcgaacccaccgccagtgctttttgcgcaaggctttgggcctcgctcagactgaattcacgcacccgcgccttcacttcaggaatgctgcgggccgacacgctcaactcatccacacccaagccgatcaacaccggcaccgcgagcggatccgccgccagctcgccgcacacgcccacccacttgccatgggcatgggcggcgcgcacggtgatgtcgatcagttgcaaaaccgccgggtgcaggccatccgcctgggccgacaaggtcgggtggccacggtcgatggccagggtgtactgggtcaggtcgttggtgccgacgctgaaaaagtcgacctctttagcgagcaccggtgcgagcaaggccgccgatggcacctcgatcatgatgcccagctgcaagtcggccaccgggatttccaggcgcaggcgctcggtcatgtcgcgggcggcgcgccactcatcaacactgccgaccatgggaaacatgatgcgcagcgggcggttgtccgccgagcgcagcagcgcgcgcaattgggcttccatgatctgcgggcgctgcaacgtcaggcgaatgccacgcacgccgaggaaagggttttcttcctgagcaatcggccaatacggcagcggtttgtcgccaccgacgtcgagggtgcgcaccaccagcgggcggccgtcaaggccgtcgagcacgcggcggtattcagcctcttgcgtggcctcatccggtgcttgcgggtgggccatgaaaatcagttcggtgcgcagcaggccgatgccttcagccccctgctccaccgcgccggcaacgcccgcgctttcgccgatattggcgaacacttccaccccatggccgtcgcgggtcagggccggttgatggcgctcggccgaggcggcttgcaggcgttgttcgcgagtgtcgcgctcaacggtggcgcgttgcagggtggcggcgtcgggagccacatgcaggcgaccgcgctggccgtcgagcagcaacgccatgccgggggtcagcaataacactgctgaacctgcgccgaccaacgccggaatgccgagtgcgcgggcgacaatggcgctgtgagccgtggcgccgccacgggcggtgagaatgccggcgacgcgcgccgggtccaggcgcgctacgtccgaggggccgacctcatccatcaccagaatgtagggttcgctcggctcctgggcggtttcgacgccacagagttgcgccagtacgcggcggccaatgtcgcgcaagtcggcggcgcgctcggcgagcaaggcgtcctgcagcgactcctgctgttgggcggcggcttcgatcacgctcatccacgcggcttcagcgctttcgccttgtttgaggcgggtgtcgacttcgtcggtcagctccgggtcgtcgagcatttcctggtgggtgatgaagatctcgcgaatggctttggacgtgctgcgctcgatcaggccttggatatcacggcgtacatcggtgagtgaggcgtgcaggcgctggcgttcaatcacgggagtttcaccgcgcaacgggtaatcgaacacctgctggatctggatatgcgccgggccgatggcaataccgggggcggccgcaatggcctggatttgactccccgccaaaggcgcgctgacaaccggctcaatatcgagcgctgcgggttgagcgctggccgtcggcaacggctcgacttcttcgcccagcccatcttccacggccgccagcaacgcgggcagcgcgtcgcccgcaatcaccggctcggcgacaaactccagcacctggccgcgccgcgcgcccaggctgagcaacttgctcaggcttttcaccgataccgcgcccaccgcgccatcaacgatgcgtacgcggatatcgccctcaaaacttttcgccaactgcgcgaggatcttcgccgggcgcgcgtgcaggccatgggcgttggccagggtaatgcgtgcgctcggccaatccggcggcagctcgccaccaagcacttccagcaccgcgcggcggctggtggcacggcccagctcctggccgcgcccttcaatcagcaacgcacagaggcgctcgagcaaggtctggtgcgcttcacccaggctcgccaggcaaaacaggccattgagcggctggccgaggtaccgcatgggtttgtccggggtgacgaaggcaaggccggggcgcttgacggtctgctcgctgtgcagccaccacaggccatcgcccagcggcaatgcatcgacttgctgcaacacggcggcgaaaccgttgctgacacaatcggcctgacgcaacaggcgcgcgcccctccacacaagctcttcaaaatcgtcggcagacacgccaaggccgatcatctgcgcatccagcgccagctcctgcggcgcgccttgcagcagtttcagcaaggcctcggcagaaccggcacggcgcagcgcctggcccaggtcggtttcaccgagggcgcgggtcagcagttgcagtaaacgcaggtgttcgtcggatttggcggcaatgccgatggccaggtagacgatctggccgtcgccccagtccaccccttcggggaactgcagcaggcgcacgccggtggaaaaaacctggtcacgggtttcaggggtgccgtggggaatggcgatgccttggccgagaaacgtcgaaccctgggcttcacgggcttgcaagccgctgaggtaaccctcggcgaccaggccgtcggccaccagtgtgtcagcgagcaggtgcaaggcagcagatttgtccacagccacctggcccatggaaatctgctctacagtgagctcaagcatgccgttctcctagttagtgcgaagggcgcactaggtattgttttgaataattcagcgcatgggtgttcaaaaatagctgaccgagtggtcaattggcagtagccactcggagacgaacatcgtaaaaatacgcctgctgaaacgtttaatctagaatttatggcaggttacgcgttaattgagcaagcttgaaggaccactcggcgcttgagttcagacattggtcgtgtgcaggaatcggttacgattggacaaaatgtcggggcaagctctaaaaaacaaggaaatcccggtttgaaactcagtgatatcgcacgtctggccggtgtgtccgtgaccaccgccagttatgtcatcaatggcaaggccgaacagcaacgtatcagcaccgcgaccgtcgagcgggtgcgtgctgtggtcgaggcccatggctttacacctaacccccaggcggcagggttgcgcagtcggcatacgcgcaccttgggctttattctcccggacctggaaaaccccagttacgcacgcatcgccaagctcctggagcaaggtgcacgggcacgcggctatcagttgctgattgccagctccgacgatgaggccgatagcgaacgccaactgctgaaactgttccgcgcgcggcgctgtgatgcgttgttcgtcgccagttgcctgccggccagcgatgacagttaccacgaactgcaggccaaaggcttgccggtgattgccatcgaccgcgtcatggagccggggcaattctgctcggtggtcagcgacgaccgccaagcctgccagcaactgaccagcagcctgttgcaaccacagcccaagcaaatcgtgttgattggcgcgcgccctgagctgagcatcagccaggaacgcgctgccggtttccgcgaagcgctgcaagggttcaccggtcaagtgatcatcgaacacggcgaggccttcagccgtgactgtggccgacagttgatggagcaacttctacaacaactggggcatttgcctgacgcactggtgaccacctcctacgtgctgttgcagggcgtgtttgatgcgttgcacgactttccgctcaagtcccggccgctgcgcctgggtacgttcggtgatacccaactgctggacttcctgccgctgccggtcaacgccatggcccaacagcatcaactgatcgccgacaccgccctgcgtctggccctggctgcgattgaagaagaacactatcaacccggcgtgcatgcgattggccgaaccttcaagcagcgtattcacgaggcgtgagcgtggagttgatcgacacccatacccacctggacttcccggatttcgatcacgaccgccaggccgtcctcgcccacagccggcaacgtggcgtgtcacgcatggtggtgttgggggtctatcagcaaaactggcaacgggtatgggacctggtgcagcaggatgaaggcttattcgccgccttcggcctgcacccggtgtacctggatgaccatcggtccgccgacctgaccgagttgggcgattggttgacgcgcctgcgtggccatcggcaactgtgtgcggtcggcgagattggcctggattacttcctcgaacagctggaccgcgaacgccagcaagtgctgtttgaagcacaactgaaactggctgtggatttccagcttccggcgcttctacacgtgcgccgtagccacgcggcggtgatcgccaccctcaagcgcattcgcctgccacgcggcggcatcattcacgccttcgccggcagcgttgaagaggcccgcgaatacatcaaactcggctttaaactcggcctcggtggtgcgcccacctggccccaggcattgcgcatgcacaaggtgctggctcaactgccccttgaggccgttgtgctggaaaccgattcgccggacatggcgcccgccatgtacccaggcgttcgcaatagcccgcaacacttgccggacatctgcacggccttggccgcacgcatgggcatcagcccttcattgctagccgagacgagcacacgcaacgcgtgcgaagtgttcagttggtagcgagcgggccgcttgcaggtgaaatgtcagccgctgccgatgccgcacataacgcagcaccaggaagtgcaccaacaccaccaccagtgaaatgttgagttgcccgataacgccgatcagccccacccactccgccgcgagcgcaacgataagtaccacgcaggttgaaatcaccagggccgggggcaccatggcccaatgatccagcgccttgaactggcgctgttgccgggggcaactcaattgcaatgcctgctgacaatacgggcactcgaaaggctcatgaatggagatggcattcagttgccagggcttgagttcgaacgtgatgtggcaatgggcgcagtgccctttgatgccgatcgcagcggccatcgcggtgcctcccttggactgtgacgagttgaaacaaattctcacccatccacgccgtcaaaaatggctcgcagagaaatcaggacagacgccacactcagcaaagacatctcctacacccgaaacgccccgatcaactgtttcaactcgatgacctgcatcgacaactgccggctggctgcctcagtctggttcgccccccaagccgcatgctcgcctgcacggttgatctcgacgatgttctggtcgatatcgtgggccaccgccgtctgctgctctaccgctgcggcaatctgctggttctggtcgacgatcatgcccaccgcgccgaggatattttccaacgcctgctggaccttttccgactgccccacggtgccgctcgccatggcatggctggtgcccatcgccttcacggccgccccgacgccactgtgcaagcggctgatcatctgctcgatttcttccgtggaatgctgggtccgtcgcgccaacgtacgcacttcatcggccaccaccgcgaaaccacgcccctgttcaccggcacgtgcggcctcgatcgccgcattcagtgccagcaggttggtttgttctgcgatgctcttgatcacttccagcacgctgctgatggcctggctgtcggtcgccaattgattgatgacccgcaccgactcatcgatctccgacgccaggcgcacaatgctgccttgttgggattgcacaagaccacggccactgacggtttcgtcgttgacgctgtgcgcactgctgaccgccgcagccgcgctgcgcgccacttcctgcgccgtggaggacatctgattcatcgccgtcgccacctgttcgatctggttgcgctggccggacaccgcctgattgctttgggccgagaccgcctcgacttcgccggcttgcagttcgacctggctgacggtgtgccccacgcgctcgatcaagtcatggatcttcgccacggtgccattgaacacttgacccaactcccccagctcatcacggctgtgggccacgaaagtgacggtcatgtcgccggccgctaccttgtccatcattgcgcccaggcggcgcagggtggtacgggttgaagcatagaaaccggcatacaaataaaagatcaacaaaaagacggcggtcagggcgcacaccagcagcaccatgtgtgtgcggttctgcgccaggcgctgctccagttgttgcccgagaaacgtcagggtcgcttcattgagttgataggtgtgagccatcaactgactgacatcgtcataaaacgcctgccacggcgcatcaagggtttcagccatcaccacctgctcttcaaacacctcgctggctcgcttgaggctggcagcgctgccctgagccaaagcgtcgagcgcagcgtgagccgccttgctcgcgccgagcgcgtcctgcaatttcagagcgtactgcgcctgcagcttttccaattgctgctgcaactcttcaaaacgcgtactggatgacgaattgagaaagccctggcccaacgaatacgcgcccatcgcccgcccttcgcctagggtttgggtgacttggggagtgacgccggtgatcaactcgctgagttggcgcaaatcactttgcgggtcgcggctcaagccggactggctggcgatgacctggctgagcgtttgggcctggttgagcaacttgccgatcaacgcgcttttgctcagcagcgaagtttcctgttgctgtgccttgaacgcggcgatcaattcgtcgcgcttgccctcaaaagcggcgctttgctcggggtcggtggccattgcattgaggccttgcaggcggctcagcacgctttgctccacggcactgattttggtttcgaggtcgccggccttgcccgcctggccgagggttgcattgatttgcacctggttgttcagggtttccaggtcacggcgcagggccaagctgctgcccagcaagtcgaggctttgcaactcggtgcgcgtgccctggaattcacgccaggagtcgcgcaccagaacggcgttggtcgccagcatcggcagcaggaacaacacgctgatcaggctgaatttcataccgaaactcaggcgattcatcaacgccacaacgggatagagcaagctcttcacgggtgaactccctttctattatttttattgaggcgcagggcaacggcagaaggccactatttggcgcactgactgtatagctcaatttgaaagggagttttgtaacgtaaggttaacgacctgtgggagctggcttgttgtggcgagcaagcttgcttgcgctggggtgcgaagcgcccctgatggcaggcgactgattcgcagccgagcgggagcaagctccctcgccacaacaagccagctcccacatttttgaccgcgccgatcagggcagcacggtccagatggcaaatccggcataccacagcaccgccgcgcgcagcagcaattcccacaagcgatccaggctgttgatgccatccgccccgactgccgacggtggaatttccgccgccaccaggccgactttttccaccagctgtgccgcgctgatgtcccagctgagcaactcatggagcatcacgcggccgaccgcgacaaagttgcccaccaaggcaaaactcgccgcgagcaggcgcacgggcagccagtcaaacgcatgacgcagttgcccggcgcgctccgccaccagcgggttctggctgtgctcactggccagcgccagcaatcgataagccaatgccgcgaccgggccgagcaggaaataccagaaaatcaccgcgaaaaagctctggtaggcctgccataagaggtggccctggacgcgttccagcagttgctcgccgctgtcagcggcgatcttcaggtcgcgctcggccacatgttcggcggcttgcaggtcgccacgccgccacgcatcacgaaacggcccgagcccggccagcaaatcaccacgccccaggctgtaaatcaccaccaacaagtgcaccggcaacgccaacaggccgtacgccaccggttccagcaccagcaacaacagcgccagcacggccactggcaacagcaccagcaacacgagaatcagccacggctgcttgctcatccgtgggctcgattccagcttggccaattcacgcagccatccgccgtcgcgttgcagccgctgacgcagggccgagaacttctcgatccacaccgccagcaccaacaccaggaaactcatcgtgcgtgtcctccatcctgcagggcgctgcgaaagcgcgtccaatcaaaagccgggcccgggtcggtcttgcgccccggtgcgatatcgctgtgaccacaaatacgttgacgggtaatgcccgggtaagccgccagcaactggcgggcgagctcgatcagtgacgcatattgggcatcggtgaacggcagctcatccgttccttccagctcgatacccagggaaaaatcattacagacctcgcgcccctcgaagcgggaaaccccggcatgccaggcacggtcccgacaggatacaaactgcgtgaccttgccgctgcgctctatcagaaaatgcgctgatacccgtaggtcggcaatcccttcaaagtaggcatgttccgtgacgtccaggcggttctggaaaaacgcctgcaccttgccggtctcgaattgccccggtggcaggctgatgttatgcaccaccaacagtgagatttcgcctgcggggcgctcgttgaagttgggtgacgggcaatgtgcaatgccctggcaccaaccgctggcggggtccaactgcataccggttccttgaatgagacgaggtgttaccagtatgccgcgttcaggcctgtggttgcgatcacttgccgcgattgagttgacgcaggttggcgatcactgcggcaagggcacggtcgaacagcaagccatcatccaggacgcgcaaggcgccctgcttgaacgccatagctaattggccagcactttgatcgagcaccttgaggcccgtgcggctgacaaaaacataggtattggccggcgccatgatcgcggtgagcttgcagcgcaaggtcatggtttcatccggttgaagctcgaaccagtcgccaatgcgcatttggtaggccctcaacaggtccgggtcatcagagggcaagttttcgatgggatcgggggcgcccctatcgaccgcaaaaggctcacacacttcgatcagcgcgtcggggcgctccccgtcgatggagtgtgcgtgcatggcctgcaagcgcacaaaaaactcgcgcgtgctgaaagggtcgaacgcggcgctggtcaaaccgtcacgcaaggccttgagcagcccgggcagttgctccaccagatgccggcccgcctcggtatctttctggaggctcacactccagatcaattcgtccatggtgcgcagccccgcctgccattgcaccgattgttcgccgtgcttgaggctggccaacaacagtacctggctccaggcctgctggaggaaatgcaccaccgccagcggcaagactttgcccagcaccctgcggttaaccacgtcggccacccgctgacgggcggcctgggtacgcacacgcccttcttcggcctcacgggtgtgctgctcaagcaattcactgcggcgccgttcatcggcggtaaacgcgctgaattgcgccagcaaccgggggaaaatcgcctgatcctcaacgaattcgttgagcaactgctgcaccacctgctcgatacgcaggtacagactgtcgcgctgatagtcgtcgcgcgggctccagccaataacggcggcggcgatctcattgagcaggcgccgcgccggatggccagggcggctgagaaagctcttgtccagcaccgccactttcagcagtggaatctgcaagcggccgatcaacgccttgaaggcgtccggcacactgcggtcattgcgcacgaactcgaacagcaaggccaccagattgatcgcatcttcgtcggcatcttccacgacacgggatttaccgcttttcacactcacccgagtcaacagctgctccagctgattacgcaggtcgaaatcgtcttcagcgtcgggttccggcacgtactgttgcagatgggagagcagccgcagcaggtcgcggctgctgatcggctggggttcggcgctggcttccagggtcggcgcgacgctgccgcgcacagcggccagcagtttctgcaaggccgcgaaggcttcctggcccgtctcgtcgagcggcgggtctgcgctcggcaggctgccctcgcgctgttgttctcgcgctgcacgcccacccggacgacgtgacggcacagccttgagctcaggcaaaacgccagtggcgaccaacaactggttggcttcgccaaacagctggtcggcgtcactgagcacatacttttcaaagagtttgagcatgatcagcttgacgcggatttccacccccaaactgcgccctgcgcataaaaaaaactcgcacagcagcgccgggcccagcgggttatcacgctcatccagcggcttgcccagcaacgcgctcaagcgagcagtgagttgccccaatgccaggccatcgcgatgccgcacgcgaccaagcatggcctccagcgccacggctttttccaggtcgtcattggacgtatccggcgtagcctcataggacaccacaggcaacaactgcaactcaccccgggcggtctggccgaggccggcaaacgcggcgaacaactgctccatgaacacgcgctcgaaattcttgcgcttgagccgcaagtcacgcatggcttcaaagaaaatgtgatggtcgacattgctgcgggccttgtcggccatttcgaacagggtgtcatcagcgttatcgaacagttcctgcaaaccctgttgcaactgctgcgcggccttgtcacggacctgcagcaacaccaccggcaagcgcgcaagcggcgatggcgtggtctgtgccttgttgatgggcaccacctttccgtcaatgtgcatcctggcctcctgaaacggcggtgtaggttcggggaaagatcggctgcgggccctgcgggcactgcaaatcaccggttatcaccaagacgtcaaagctatgacgccaattgcaaggcgcgagattatcttgcaaatgagggccattgcgccagcaaactctgtcattgcgcggtaattgggtggcgagtctgggttcaagggcgcacagcccctataatcgaggcactttgtttgtggagcccgttatgccgaatctccgtcttgccgacctcaccgccgaaatcgaagccaacgtgcgccgcgcgctgctggaagacatcggcagcggcgacatcaccgcacagttgatccccgccgaacggctggccaaggccacgatcattacccgcgatgcggccgttattgccggtacagcctgggtggatgcggtgttccgccagctcgacccgcgggtcgcggtgcattggcaagtggccgacggtgagcgcgtcagccccgaccaggtgctgtttcacctcgaaggcccggcccgttcgctgctcagcggggaacgttgtgcgctgaactttctgcaaatgctgtcgggcgtagcgacccgcgcgcagtacctggcggattttgtcgccagcactcaagtcaagttgctggacacccgcaaaaccctgccaggcctgcgcctggcacagaaatatgcagtgacctgcggcggctgccacaaccaccgcatcggcttgtatgacgcgttcctgatcaaggaaaaccatatcgccgcgtgtggcggtatcgctcaggccatttcggccgcccacaagatcgcccccggcaagccggtggaaatcgaagtggaaagcctggaagaactgcgcgaagcgttggcggcgggcgccgatatcatcatgctcgatgaattgagcctggacgacatgcgtgaagccgtacggctgaacgggggcaaggccaagctggaagccagcggcgggatcaacgaaaccaccctgctgcccatcgcgcagaccggggtggattacatctccattggcgcgatgaccaaggatgtgaaggcggtggatctgtcgatgcggctgagtatctgaaaacgttgaaagggccggtttgccggccctttcaatgaggtttcaaaccaccaggtcattcatctcgcaatattcttcccactcgacacccagcacctctgccgcctctttgtgcaaggccagccgtgcggcttcgaattcctctggcgtcgaggtgtacttgagggtcagttcccaaggctgatagccctggctctcggcctcatcctcaaatgcccactggatctgatcatgctgatcatcagcgctcaggtccttgatctcttctttaagctgcggcgactcctcgaggtatttctcgagggctttttcgtgccgggcttcctgggtcatttcagtcgtggtcatgttgttctcttagatcaaggaatggggatgcatctgggtcatcaaggttgcgcagatacaaaagagtgggcacgaatgccgcctcgtctggccttcagaaccattctgggatcatctgaaaacgttgccgtagaacatgcctttaaaacagtgttgcccttttgcccgagacaggaatcgaacctgcgaccttcgcgttacgagtgcgctgctctaccggctgagctacacgggcggtgggctaaagctagcaccgcattggccatgcggcaactgactcgcctaccacccggcggtacttatgcgccgtctgcgccgcaacccttggcgacgtattgcgcgtcagcggtggtggcgcatttccagcccgtggtggcgctgcgtgtcaaggtgatggtcttgcccagcacgggcgccggcgcatcgaggatttcacagttgatggacccggcaccggtggcgacatccccggtcacgtcaatcctgcagttggcggtggggctggtgccgccgaccaacgcaacggtcggcaccgtgccgctattgatcgtctcttcgtagccggctttcaacgccgaaatttcagccagccccgccgtgaacttggccttggcctggtgcttggtgtacatgggcaacccgatggtggccaaaatgccgatgattgccaccacgatcaacaactcgatcaaagtaaaacctttctgacgcatcacattcactctccagaaatagaacccgattcagggcgcttcctgcgccccgcaatgtgcagcggggccagtgtactcatccgtgagcggtcaatcgcgtccaggacgcacaatctgacattttatcccgggccggccgcctgcccaaatccgtcacctgactaagctataaatcttcaactaccggtgtgcggaaacgcgtcatgaatgaagcctcaacgatctacgcctgggaaggcatcaaccgcaagggtcgcagggtatccggtaaaactgccggaaaaagccttgccctgatcaaggcacaattgcgccaacaaggcatctgccccggccgcgtgcgcaagaaaatcccgagtttgccaagcttcgctccgccgataaggcccgccgatactgcgctgttcacacgccagttggcgaccttgctgcgcgccggcataccgctgctgcaagcgttcgatatcatccgcgagggcttcgaccaccgccagatgcgcacgctgatacacggtttgaaacaggaaatcgccggtggcaacacgctgtcggcagcgctgcgcaaacacccgcgccacttcgatgaactgtattgcaacctgattgccgccggtgaacaggccggcgccctggaaaccttgctggaacgggtggcgattcatctggagaaaagccagcagctcaaggcgcgcatcaaaaaggccatgacttaccctgctgccgtcatcgtggtcgcgtgcggggtcagcacggtgctgctgatccacgtggtgccgcagttccagaatctgttcgccggggtcgatggcaatctgccaagctttacattggctgtcattgccctgtccgagtttctgcagcgagcctggtggatgattgcgctgggtgcaggcggtgcaatcatcgggtttcgacaggcctgtcaaagctcccagagttttcgtcatcaggtggacgccggtttgttgaacgtgcctctggcaggcacactgctgaaaaaatccgccatcgcccgttacgcccgcaccctctcgacgacctttgcggcgggcgtgcctttggtgcaggctctgggttccgtggcaggcgcgacgggcaatggaatgttcaaacaggcgatcgagcatatgcgtcacgatgtatccaccggcatgcaattgcatcagtccatgaccggcagcggtctgtttccccgcatggccatccaaatgacggcgatcggagaagagtcgggcactctggacaacatgttggagaaggttgccgatcactacgaggccgatgtggataacctggtcgacaacctcacgagcctgatggagccgttgatcatggtgatattgggtggcattgtcggcgcgctggtgatcgccatgtacctgccggttttccagttggggtcggcattttgagcctgctgctgattgaacgaccgtggttgtttgtcggggtcgcgctggtgttgggcctgatcatcggcagcttcctcaatgtgctggtgtggcgcctgccgaagatgctggaacgtgaatggcgtgcccaggcccaggagattctcggcttgccggctgaccccgagggtcccgtttacaaccttgcgcagcccaattcctgctgcccgcattgcaaccagccgattcgcccctgggaaaacattcccctgctcagctacctgatgctcagggcgcgttgtgctcattgccgcgagccgatcagcgcccgctaccccttcacagaactcgcctgtgcgctgatctctggtgcagtggcttggcatttcggcttcggttgggaagcgggcgcggtactgctgctcagttggggcctgctgggaatgagcctgatcgacatggaccatcagttgttgccggacgtgctggtgctgccattgctgtggctgggcttgatcgctaacgggttcggcttgctggcggcgctgcacgatgcgctgtggggcgcggtcattggttatatgagcctgtggacagtgttctgggtgttcaagcgggtcaccggcaaggacggcatgggccacggcgacttcaagttactggccctgctcggtgcctgggggggttggcagattttgccgatgacgctgttgatggcatcgctgctcggggtgtgtgccgggcttgtgctgatgcgtttgcgcaagtcccaggcctcggtgcccatgccttttgggccgtgcctggcaattgccggctggattgcattgctctggggtggtcaaataaccgacttctatttgcagtctgtcggtttcaaatgaccacttctgtcgcaacaccctggattcttggcctcaccggcggcatcggcagcggcaaaagcgcggccgcccagcactttatggagctgggcatcgacctggtcgacgccgaccatgccgcgcgctgggtggtcgagcctggccggcccgccttggcacgcatcgccgggcatttcggcgacggcgtgctgcagcccgacggccaactggaccgcgcggcgctgcgcaagctgatctttgaagtacccgaagagcgccgctggctggaagccctgctgcacccgttgattggcgaggaaattcgcagccacctggcccgcgcccgctcgccttacgcgattttggtgtcgccgttgctgatcgagtccggccaatacagcatgacgcagcgcatcctggtgatcgatgtgccgcaatcgctgcagattcagcgtaccctgcagcgcgacggcatcagcgagcaacaggtgcaggcgattctcaaggcccagtccagccgcgaagaccgcctgaaccatgccgatgacgtgctggtcaacgacaaagacctcgcctggctgcacagcgaggtcgagcgactgcatcacttttaccttactttgcgtggaggccgatcatgagccaacccttgaccgtcgactgcccaacctgcggtgcacccgtggaatggaaagcgaccaacctcaaccggccattctgctcggaccgttgcaaactcatcgacctgggcgcctgggcggccgaggaacacaagattcccgtggcaccggatgctgaagacgagttgttttccgaagacctgccgccgcgccactaaggccgcataaaggcatattcctgctggtcgtcgaggttctctgcaaggtattgcagctcgtcggccaggtcttcaaaggtgcgcacccccttgctctgctgcaccaccgcgctgagcatggcgcgaagggtcaaacccgggtcgaagccgatttcctgtgccgcgtcctggcttctgcgcaactcctgccgtgcccactcgtacacactcatggttcgtgctcccgctcgctcaaaaagtttcgcggagcatgggcctgccgggctgcccgggatttgatctggatcaacgctgcgaatcgtcatccttccacggcgccgaaagataacgtgtgcggttgaaggtctccagccattcagggcaaaacaccaccagcgcgctaatgaccatgccgttgataaaagcttcggggaagatgatcagccacaggtagccgacgaaatcctccagccactcgggcattgcgaaacggccgtcgaaccacagcaccccaagcccgaccaacaggcacagcaaggccgacagcgcggcggcaaagaaaccggagcaaaagatatacacaaaggggtttcgcggttgcgcccgctcaaccagcagcgcgcacgcctcggtcaccagtaccggcagcgcaatcaacaacaaaccgttgacgccgacagccgccaggtcctgccgcccgagcaacacaagccccacctgcgcggcgagcccgccaacgattgccaaaggccagtcgagcagcaaagtgacagccgtcatgccgataaaatggtacgagacgccggtatcgaaatcccgccgcaccagccatagtatgaacaacgcgaacaccgtgccgaacagcaaatgctggcgccgccggtcggcaaacagctcgacccacggcgaacgcaggattgcccacaccaccagcggcgcataaagcaaccagccgatggcgagagtttgcggtgccaataccgctgcgctgatcacggatgctgcccctctgcatgaaacctcatcacgcacctcatccctgcggttgccgttgagtcgtcagtctatacccgtgttttaaagcaagacttcctgcggtcatcatttggacgctaagctgccactatggatgactcagattatttgcgcctgctcaccgtagcggccgaacaagccaatgcgtttttgtccaatgcccgcaaatgggagcgtgagcgttgggtctgccagcgcctgcttcaaggcctgaatgtgccctaccgcgccgaagaatttcacgccgctggccaggaaccgcccgacgtgctgtttcgggatgccagtttcgaagtgtttttcgtgctggatgaggggcgccgcctgaacgacgagtggcgcgatgagttgttgcgccggcgcagtgcgttttccctgagccagctggtgcggcgcgaggccaagccgcgacgcatcccggcgcatgagtttctgctgcgtctggcgccgaccctgcgcaaaaaagcgcataactacaaagaacgcgggatggacctgggcgagctggacctgatcgccttcaccagcctcaagcgcgaagtgctggacctcaacagccacttcccgccgcccaccgaatacctgcgccagggctggcgctcgctgtccctcgtcgggccgaccttcgcccgcgtgttgttcgcccacccggacgcaccggacttcttgcgcaacaacttgggccgcagcatagtattcgacgtgggcatcagcctgtgacgcgggcacaggctacgcttgtggcgatcgcgccaagtccctgactgtaacgtggcgcccttttgcaacgtctacctgacgaggcctttatgaccagccgcctgaaccccgatgaccaacagcatgtcgaagagtacctgcaactctcccagaacagagtcgagcgcaagcctttcaggccgtggctgctcctcgttgtggtgctggtggcagtgatcgggctcggtctgctgagccgccttttgagttacctgacgctatgagctgcctggcgctcgcgggggtaactgctccgatttcttttagccttgcgagatatccccatgacccatcgtattattatcgtcggcggcggcgccggcggcctggagttggctacccgcctgggtaagactctgggcaagcgcggcaccgccagcatcacgctggtggacgccaacctgacccacatctggaaaccgctgctgcatgaagtggctgccggctcgctgaactcatcggaagacgaactcaattatgtcgcccaagccaaatggaaccacttcgagttccaactggggcgcatgagcgggctcgaccgtgagcaaaagaaaatccagctggccgctacccttgatgaagaaggccgtgaactggtgcctgcacgcgtgctgggctacgacagcctggtgatcgcggtcggcagcaccaccaatgatttcggcaccgaaggcgcggcgcagcactgcctgttcctcgatacccgcaaacaggccgagcgtttccatcaacaactgctcaaccactacctgcgcgcccatgccgggcaaaccgatgtggaagaaaacatcagcgtagccatcgtcggcgccggcgccaccggcgtcgaactggccgccgagctgcacaacgctgctcacgaactggcggcttacggcctggatcgcattaagccggaaaacatgcacatcaccctgatcgaagccggcccacgggtattgcctgccctgcccgagcgcattggcgggcctgtgcataaaaccctcgagaagctgggtgtgaccgtactgactaactcggcagtaagtgaagtgacggcagacgcactgatcaccagcagcggccaggtcatcccggccagcctgaaagtctgggctgccggcatccgcgccccgggtttcctcaaagatattgatggcctggaaaccaaccgcatcaaccagctgcaagtgctgccgaccctgcaaaccacccgcgatgaaaacatcttcgccttcggtgactgcgccgcctgcccgcaaccgggcaccgaccgcaatgtaccgccacgcgcccaggcggctcaccagcaggcatcgttgctggccaaatcgctgaagctgcgcattgaaggcaaggacttgccaacctacaagtacaccgactacggctcgctgatttcgctgtcgcgcttctcggcggtgggtaacttgatgggcaacctgaccggcagcgtgatgctcgagggctggttggcgcggatgttctatgtgtcgctgtaccgcatgcaccagatggcgttgtacggttttttccgcacggccatgttgatgctcggcagcaagatcgggcgcggcactgagccaaggctcaagctgcactgacgcactgtacggcagtaaaaaaatcccccggtcttgcgacagggggatttttattgggcgcggtaaaactcggccatgtggtcgacaaacgcccgcaccttcggcgcaaggtgccgggactgtggataaagcgcgtagtaatgtcgctcgcccaatgagtaattgggcaggataggcacaagctggccctgcgccagatcactgcgtaccgtggcctgggtgaaacacgcaatgcccgcgccggcgagggttgccgcgtgcagcgcactgattgtattggttctgaattgccccgaaggcgtgaccctgaccgccccacctcgcactgtgctcagctcccaatccgaagaggcaccgacaaaggtcaacaggcgatgcttgttgagttcctgggcagtgcggggcaagccatggcagttgatatatcccggtgatgccaccaggacctgcctggaaaccgtcaacgtgcgtgcaatcagcgaggtatccgccagtgcgctggcaattcgtattgccacatcaaacccggcggccaccaggtcgacgaactgatcatcgcaacacaactcgagttctatgtctggatagcgtcgctgaaaacctggcagccagtgcggcaagtccagcgtgcccaccactaagggcacgctgaccctgagcaagccttcgggccgctgatggcctctggcaatcagctgggaagccgcatcgatacgctcgaggatatccacgcacgccgcgtagtactgctctcccgccgaggtcagactgaaccgccgcgtgttgcggttgatcagttgggcgcccagctcaacttccagttgctgcaattgccgggaaatcgtcgagtgcgtagtgtccaggcgctccgcagcagcagaaaagcccttggcttcgacgatgcaccgaaaggcgcgcatggcagataactggttcatcaagcaggctatcccgggcagatcagagaatcagttaaccggcagagcgaggatttgcgacgtggtcagcaccgaaccaaaggtgtcttcgatttcagccagtgccgaattgtgcagttcatccttgttaaccgaacggccatcggcccgggtaatcgcccgagtagccgtggcgtcggatgctaccacaacgtcgtagcccaacggcgcagcgtcccgggccgccccggcgacgcaggcgtgggtcatcaggcctgtgataatcagggttttgacgcctgcctttttcaattgcgcatccaggtcggtgctggcgaacacgctgacggtggttttctgcacgagcttgtcttgtgggcgcggcttcatcagcgggtgaaagtccacggtcttgccgtcgctggcaaacactgcggcgcccgccggtgcgatgtgttgcacatgaatgacctgcatatgttgcgcgtcggcaaactcaatcaagcgacgggtgttttccagggctttcaacccatccgggatcggcatgcgaccggtgaaatattcattctggaagtcgatgaccaacaaggcagtagttttcggggccagccgctcggttggcttggcaccggacatggcgcgaatggtggggtgctggttcgcggcggtttcggcggcggcagcacactgcccgagccccatcagcatgcccaggccaacaagggtggtcttgagcagcgcgggcaacgaacgaacgggttgaatggccaagataggggtcatgatgcgggttcctgtgtaggtgagtaactgacgaggcccagtctaggaggcctcgaccgctgcaccaacgcaccaatcagcacaatatatgtttgaaaactgcacaaacgagatcaaaaaacaggcaaaaaaaatccccgtatctttcgatacgaggatttttaatatggtcggggtaaggggattcgaactcctgacatcctgctcccaaagcaggcgcgctaccggactgcgctataccccggtaaaaaaaaggcgacctttcagtcgccttcttcgatcagcgcttttggcctctgatcttaagattcgattccagcgttaactggtctcaaaaatggtgggtcgtgtgggattcgaacctacgaccaattggttaaaagccaactgctctaccaactgagctaacgacccaaatatggtcggggtaaggggattcgaactcctgacatcctgctcccaaagcaggcgcgctaccggactgcgctataccccggtttgaaattggctccgtgaccaggactcgaacctgggacccaatgattaacagtcatttgctctaccgactgagctatcacggaactacatatttcaaagtacaacttttactactatccaaccttctcttcgacttgcccgtatcgctacgttcatgtgtctgaggcgcgctattctacaatcttaaaaacccctgtcaaccctttaaattgcttttaagacaatgatttgcgcttgtttctgatttcttcttggggagaagaaacccgtgggctgacgttgctgcggggcgcactttacaagcctttgccttacagttcaacgccctatcgaaaaaaaaggccccgcaatgcggggcctcctcttatcgccataccggccgggctcagtggaagacgatttcgtcgttttccaccgtcgccttgacgctggtgcccggcatgaagctgcccgacagaatcaactgcgccagcgggttttcgatccagcgctggattgcacgcttcagcggccgtgcgccatacaccgggtcgtaaccgaccgcgatcagcttatccaacgcctcgccgctcagttccaggttcaactcgcgctcagccagacggccacgcaggcgacccaattggatctcggtaatgcctgcgatctgatcccgcgccagaggctcgaagatcaccacttcgtcgacccggttgataaattccgggcggaagtgcgacgtcagcgcatccatcaccgcagcgcgctggccttcacgatcgcctaccagctcctggatctgcgccgagcccaggttggaggtcatcacgattaccgtattacggaagtccaccgtacgcccgtggctgtcggtcaaccggccatcctccagcacttgcagcaggatgttgaacacatccgggtgcgccttctcgacctcatccagcaagatcaccgagtaaggcttgcggcgcacggcttcggtcaggtaaccgccctcttcatagcccacatagcctggtggtgcgccaatcaggcgagccaccgagtgtttctccatgaattcggacatatcgatccgcaccatggcctcttcagtatcaaaaaggaactcggccagggccttgcacaactcggttttacccacgccggtcgggccgaggaacatgaacgagccgcttggacggttcgggtcggacaatccggcccgcgaacgccgcaccgcgttggacactgccaccaccgcctcttcctggccgatgacgcgctggtgcaacaggctttccatcttcagcaatttgtcgcgctcgccttcgagcattttcgacaccggaatgccggtccacttcgagacgacttcggcaatttcttcctcggtcaccttgctgcgcagcaactggttctcgggcttgccatgctggtcgaccatctgcaggctgcgttccaggtccgggatcaccccgtactgcaactcggccatgcggttcaggtcacctttacggcgcgcggcttccagttcctgacgggactgctcgatcttttgctggatctgcgcagaaccttgcacttcggctttttccgaggtccagatttcctcgaggtccgaatactcgcgctccagacggacaatttcttcctggagtttttccaggcgcttcttcgccgcgtcgtcctcttctttcttgagcgcctgagattcgactttcagttgaatcaggcgccggtccagacggtcgagcacttccggcttggaatcgatctccatacgaatgcggctggccgcttcgtcgatcaagtcgatggccttgtccggcaattgacggtcagtgatgtagcgatggctcagtttcgccgccgcaatgatcgcaccgtcagtgatcgccaccttgtggtgaacctcatagcgctctttcaagccacgcaggattgcgatggtgtcttcttcgctcggttcttccaccagtactttctggaagcgccgctcaagggccgcgtccttttcaatgtactggcgatattcgttgagcgtggtcgcaccgacgcagtgcagctcgccgcgcgccaaggccggcttgagcatgttgccggcatccatggagccctcgcctttaccggcgccgaccatggtgtgcaattcgtcgatgaacagaatgatctgcccttcctgcttcgacagctcgttgagcagggatttcaggcgttcttcgaactcgccacggaacttggcgccggcaatcagcgaccccatgtccaacgacaacaggcgtttgcctttcaggccgtccggcacttcaccattaatgatgcgctgggccaaaccttcggcaatcgcggttttacccacgccaggctcaccgatcagtaccgggttgttcttggtgcggcgttgcagcacctggatggtgcgacggatttcatcgtcacggccgatcaccgggtccagcttgccctcttcggcacgcttggtcaggtcgacggtgtatttatccagggcctggcgcgactcctcatggttggggtcattcaccgcatcgccgccacgcaggttgttgatggcgttttccagggctttcttgctcacaccctggcccagcaacaatttgccgagcttgctgttctcgtccatcgcggcgagcagcaccagttcgctggagatgaactggtcgcctttttgctgggcgaggcggtcagcctggttgagcaggcgcgccaagtcctgcgacatgttcacgtcgccggtggggttctggattttcggcagttggtcgagctctttgctcaactccttgcgcaggctgttgacgtcgaagcccacctgcatcagcaagggcttgatagaaccaccttgctgttccaggagcgcctgcatcaagtgcgcaggctcgatggccgggtggtcgaggcccaccgccagggattgagaatccgataaagccaactgcaatttgctggttaaacgatcaatacgcattagtcaccttccttttgagcaggccggagctagaaatacacatcctgaatgaagaaacctgccagatacccctatagatggggtggattctggaagattcaagctgtggatagttgacgcagatcaggagagtctagcgttccagccagataagggaggcgaaccgaccggtgcgcgggttgcgccgataggaaaagaaacgagggtcggtcacggtgcagaatccgccgccataaacagcagtgacaccccgcgcagccagacgcaggcgcgccagctggtagatgtcagccatgtatttgccggggttgcggctcggcacaaaggcttcagcggtcaccggcaattgctgcatgaaggcttcacgtacttccgggccgacctcaaaggcttgcgggccaatggccggacccagccagaccaacacgtcggccggctcggcgtccaggctttcgacagtggcctcgagcacccccgccgcgagaccacgccaaccggcatgggcggccgctacgcgagtgccggcacggttgcagaacaacgcgggcaggcaatcggcagtcatggaagtgcaggcgatacccggtgtacgggtccaactgccatccgcttcgacggtgcgcgacgggtcggcctcgaccacagtcaccccgtggacctgacgcaaccaggcgggctggatatcaaaggtatcggtaagacggcgacgattttcgagaacggccgcaaggtcatcctcgacatgatcgcccagattgaggctgtcgaacggcgccacactgacgccgcccgcacgggtggtgacgcaggctttgactcccgacggcgcgggccagtcaggaatcagccagtcactcatccgataaacgcctcacgatcctgcttgagcagcgacaacaaccagacgaggtcgtctggaagaggcgattcccagctcatccgcttaccgctcgtcggatggtccagctccaggaagcgtgcatgcaacgcctggcgcggaaagcttttcagcgattcaaccatggtctggcttgccgccggcggaatgcggaagcggccaccgtaggcaggatccccgaccaacgggaagttgatgtgcgccatgtgcacacgaatctggtgggtgcgaccggtctccagcttcacccgcacgtgggtgtgggagcgaaaacgctccagcacacggtagtggctcacagcctgcttgccgccttccatcaccgccatacgttggcgctgctggccgtggcgaccgatcggggcgttgatcttgccccccgccaccacgacgccgatcacgatgcactcgtagatccggctgacgctgcgactttgcagttgtgtgaccaactgcgtctgggcctggatggtcttggccaccaccatcaagccggtggtgtctttgtccaggcggtgcacgatgccgcagcgcgggacattgatgatgtccggcacgtggtgcaacaaggcattgagcaaggtgccatcagcgtgcccggctgccgggtgaaccaccaggcctgcgggtttgttgatgaccaggatgtcgtcgtcttcatagacgatatccagctcgatgtcctgggcaacccattctccctgcgcttcctgctcggcagtcaactcaagaatcgcaccgccatggactatgtctcgcgggcggataaccgctccatccacagtcaggcggccgtctttgatccaggcggaaaggcgcgagcgcgagtgctcagcgaataattgtgcggcgacttgatcgaggcgttggccgcccaattcggacggcacctctgcgcgaagttcaattttatcggacatgctcagactaggcgtggcacagcctttggtttcggctgcgcgcttgtggttaaatacggcgtcttttgccccgaggctttcaacggggcgctcatcataacaggacggccccgcccaagacagcggccgtcatagggacgcaagccgccatgcaagtgaaacacctgctgctgatcgccatcctcgccatgactgctgcttgctcgtcaacaaaggaagtcgtcgacgaaaacctgagcgaagtcgagttgtatcaactggctcagaaagacttggacaataatagctacaccagcgccacagcgaagctgaaggccctggagtcgcgctatccgttcgggcgctatgccgaccaggcccagcttgagttgatctacgccaactacaagaacgccgaaccggaagccgccaagtccgccgccgagcgttttatccgcctgcatccgcagcacccgaacgtcgactacgcctactacatgaagggcctgacctcgttcgaccaggacgttggcctgctggcgcgcttcctgccgctggacatgaccaagcgtgacccgggtgctgcccgcgactcctacaacgagttcgcccagctgaccagccggtacccgaacagccgctacgcgccggacgccaagcagcgcatgatctacctgcgcaacctgctggcttcctacgagattcacgtagccgactactacctgacccgtcaggcctatgtagccgcagcaaaccgtggccgttacgtggttgagaacttccaggaaaccccttccgtgggtgacggtctggcggtgatgacccaggcttaccaggcactgcacctggacgcattggctgctaccagcctggaaaccctgaagcttaactacccggactccccaaacctgaaagacggccagctcgtgcctcgggttgccgaagccgacaaccgttcgtggctgagcaaatacaccctgggcctgatcagctcccgtccaccgttgccgccgggcgagacccgcgccaaccaggacgtgatgaagcagttccaggacgccaaggatgccattccttcggagctcaagccgcatgacgccaatggcgacgtgatccaggaagaagcaccacaggccctcggcaacaacgaagaccgctcgtggttcagctacatgaccttcggcatcttcgactgatctgtcgacgcgttacaaaaagggagccctcaaggctcccttttttgtgggccagcatattgcactgtgcgcccgtcgcgtccttggctaaactggcgcattccctgtcgagaaactgcccatcatggttcgtctactgttctggattgctgtcattgctgccgcggtttggttctggcgcaagttcaaaagcccggccgccaagcagcagcgctccggcgagcctgaagccgccttgatggtgcgctgcgctcactgcggcgtgcacttgccgcaaaatcgcgctttaagctcacgccaagagtggtactgcacccaggcacacctggaacaagggccgaagtctatccagcgttgattcggccttgcggggcataaggcgccgggtcgatgatcggcgtatgccccagcaacaagtcggcaaataactggcaggacgccggtgccagcaccaggccgttgcggtaatgcccgcaattgagccacaacccgttgaagcccggaacctcgccgatataagggatgccctccggcgaaccagggcgcaagccggcccaatgcccgacaacctcggcgtccgccaacgcgggaatcaactccaccgccgaggccttgaggctttccagtgccgactcggtcggcgtcttgtcgaaaccctcatgctccagcgtgctgccaatcagaatgtgcccgtcacgccgcgggatcgcgtagcgccctttggccaggaccatgctcgacaggaagtccgccgcgcatttatacaaaatcatttggcctttgacgggctccaccggtagcgccaaacccagcttgccgagcaactccccactccaggcgcctgcagccaacacgacctgatcgccaaaaatctgcccggtggccgtgttcacccccaccacgttgccgccttcgagaacaaagccatgcacttcgcactgctcgtgaatggtcacgccgggaagcgccagcagagcggccttgagggacttgaccagccgcgggttgcgcacattggccacatcagccatgtagatcgcccgggaataaccgccgcccagtacagggaccgcatcatgggcagccgacacgtccactttgctcaatggccggccttcgcgggcagcccaagccagcgcctcggcctcgtcatccaggtccagccagtagagccccgtggtatgcacctgcgggtcaacgcccgtggccgcgaacaatcgctgggccaactgcggataaaaatcctgggaccagtgggccagggcagtgactgccgggctatagcgccacggatacaagggcgaaacaattccgccacccgcccatgaggattcctgcccgagcccggaacgctccagcagcacgacggcctgaccgtgggtggcgaggttgaacgccgtcaacaacccgattacgccgccgccgacaatcactacttgctgttgcttagccatcatttgttccagccgataaaaagggaaaagcgcgcctggcgcccattcatccagcactctcatcattgcccccagcacgcccggcgcgatgcttcaggtagcgcgccagtgttgctgcgcaccccggtgctggtcaggctgaattcgccacaagggtcgcccgccatgacagagccgacgaccggcgtggctaccaggctgaatacctgaggctgcaatgcagcgctgattctatagcgatcattgccctcactgacgccgcttgcatcaataaaagtgccgttgcgcgtgtagaaacgctccaggtactgcgcttgctccaccagcaacgcaacaatttctgcgcgataagcctttcttgcgtgcccggtgtagccggggtaagcgatcccggccagcaaagcaataatcaaaacagcgatcagtagctcgatcaaagtaaaaccctggcaatccttgcccattggtaagttccttattgaagttgccgccataaaacccgtctaagtctcccgccacgctcctcatttgcctgcacatacaccgcttcgagaaccgtgcgcgactgccccatgagcccgaccgccgttacccggtacaacgccgtcggtttcccgcagggctgatctgccagccccagcgactgaaccccatagaggccacccgccaaggcaacccaggtaaccgctgacacagggtgcgtcccggcactgatcaccgagtacgactcttgcggcggcgcacaggtgctgatggattgacacaacggcaatgcactccccgcttgcctgatcacccatgcaccctggtccagcccgctttctgcagattgaaatgactgattacgatgccagaggctgccggcgattttttgctggaacaccgccccctgcatcgacgccaggccggccagtgataaaaccagcagaaataacaggctgatcaacaacaccatgccgttctgccgaacaccgatgcgctcaacgcttgccatggtcgccctgccccagccggttacgcagtgccgccacgacgctgtaatcctgatctttcacgcgcccagaggggtcacgcagcgtcatgtggatacgtacgctgcgtatcagcgactcatcggccgggctggcgtcataccgcacaacccccttcgaccccacgtcggccgccatgccgaaaccgatctcgaatgcctgtacgttatccaccaacaccgtcctggccggtgctgcgggtgtgctgactttcaattggccggtctcgaaggtgtaggtgcgttggcgtattgcaaaccgtatctggccgggcgccggcgacggcgagtgacccgcataagcatgggcagtgctacgacaatcggaaagcacggtccagtcaggcgcgcctccgtcactgccgacatcagcggtgaccagtgtcagagacctggcacccccagaggcgctccagccgacaggccggtcaaacgctgccggcgcattgtcgatggcggccactgccaggcagccaaacatgcctgcctgacgtatatcctggatcatcttgcccaatgcaaaccgggcatcatcctgaagcaaaattgcagcctgctgggcagcctgtgtcgcccgggaattgatcaccacccggctgattccgagcaggagtaccaaaccgaccgccagcgccagcagcatttccaccaggctgaaccccctgacagaacgattcattgcccaccctctgtatcactggcaatacggctggtcaggctgaacgtttcccgcgcagccggagtacttgcgcccctggcgtcatcccaactgatgctgaccgtcacttcgctgccgctgacagccaccgagcccttgccgcccgccccggcaaacccgacgatgttggcctcaaagtcatgaaggtccaatgctcgtacgctggcacctggaataccgggtgatgcactgccggcttgattccaggtgtaatcgacgcctgagttggcgcgcatccggtccagcatgtcgtaggcaatgaagctggcctggctggccattcgcgaactgtcggtgtacttgagggcattgagttgaatcaccgcagcaccgagcaggccgacagcgagaatcagcaccgacaccagtacttcgaccagcgtcatgccagattgctggcgatgccgggggctggaaaaatgtgtgttcaggggtgcagacattcccgtcgtcgtccatgtcgaaggcctgagaggcagcagaaaactgctgtgcggcccaagactagcgccggattttggcccgcgcagctcccggaacaaagggaaatactttggacataaaggccatcactcaacgctgcaagtccagggctatacctgaaactaccggctgaaacacgcactgcgtccacggagggacagcccatgaaacagcgaggttttaccctgatcgagttgctgctcgccctgctgctgagcggcatcctggtgcaaatgacagtgcccggcgtcaaggggctgctggaatcacggcacagaagtctggtggcaaacgcgctggcggagggcttgcgtttcgcgcgcgtcgaagccatcgctcgcaatcgcgccgtgattattcaggcgcggggcgacgactggggccaaggatggcgagtgatcgtcgatgtcagcggacgcggccatctggacgacaacaacccggtgcttctggagcgtcaaggcagcgggcgctctgtgattgcaggcaatgggccggtcaagacccaggtgcgtttcagcgggttgggcgagccggtttttacgcgcgggggctttcgtgccggcaccctgcacgtgtgcgatgcggagcgggcacaaagcatctttcaagtggtactggccccgagcggaaggatcagcctgcgcagtgataataccgagcaggctttatgccgaagctgatccgggaccttgcggaatcagagcagcgagcgaacccgcaactctttgggcatggagaacgtgatgttctcttcgcgaccggccaactcgtcggcgccggtggcaccccaggcctgcagttgctggatcacaccacgcaccagtacttccggggccgaggcgcctgcggtaatgccaatgcgctcgacaccatcgaaccagctgcgctgcaggtcttcggcgccatcgatcaggtaggccggcgtcgccatgcgctcagccagctcgcgcagacggttggagttggagctgttcgggctgccaaccaccaggaccacatcacactcattggccaattgcttgaccgcatcctggcggttttgcgtggcgtagcaaatgtcgtccttgcgcgggccgccaatcgccgggaagcgtgtgcgcagggcatcgatcacgcggctggtgtcatccatggacaaggtggtctgagtgacgaaggccaaacggtcagggttgcgcacctgcaggtcagcaacgtctttctcgtcttccaccaggtagattgcgccgccattgctggcgtcgtactgccccatggtgccttcaacttccggatggccagcgtgaccgatcaggatgcattcacggccatcacggctgtatttagccacttcgatgtgcaccttggtcacgagcgggcaagtcgcgtcgaacaccttcaggccacggccagccgcttcgttgcgcacggcctgggaaacaccgtgggcactgaaaatgacgataacgtcgtccggcacctgctcgagctcttcaacaaatatggcgccgcgggcgcgcaggtcttcgaccacgaatttgttgtggaccacttcatggcgcacgtaaatcggcggcccgaagacttccagggcgcggttgacgatttcgatcgcccggtccacgccagcgcagaagccacgggggttggcgagtttgatttgcatgctgtgcctcgtgtcttgcagcgcaagaaattggatcttgtgggagccagcttgcctgcgatgcagacacctcggtgtatcaggtacaccaggatgatgctatcgcaggctagccagctcccacacaagccagcgcccgcaggcaccggttttgtcagtcagagcgctttaacgtcgaatatttcaacatcaaaggtcaaggttttaccggccaacgggtgattgaagtcgatggtcacttgcgcgtcatcgaacgtttttaccacgccgggcagttcggtattcgccgcatcattgaagatcaccagcaggccttccgacaggtccatgccttcgaattgcgagcgcgggatgatctgcacgttttgcgggttgggctggccaaaggcgttttccggcaggatttgcagggtgcgcttgtcgccagccttgaaaccgaacagggccgcttcgaaacccggcaacaggttaccgtcgccaaccttgaaggtagccggggttttgtcgaatgtgctgtcgaccgtgtcgccattctccaggcgcagtgcgaaatgcaaagtgacttccgtgttctggccaatacgttgctcagccaatacctgatcagtcattgacggtctctccggttttcttgctcttgaacatatccaacgccagcatgattgcaccgacggtgatggcactgtcggcaaagttgaacgccgggaagtaccagcggttctgccaatgcaccagaatgaagtcgatcacatggcccagggcaatgcggtcatacaggttgcccagcgcgccgcccaacaccagggccagggcgatggccaaccaggtgtcatcgcggccgaggcgcttgagccacaccaccaacactgcactgaccaccacggcgatcacggcgaacagccagcgctgccagccggagctgtcagccaggaagctgaaagctgcgccggtgttgtaggccagggtccagctgaagtagtcgggaatgaccacaatttgctggaacatctgcagggagccttcgaagtgagccttgctgacctgatcaatgatcaggaccagcacactcaatacgagccagcccagacgtccgaaacggctggaagcattatgcatagtggcgaacctcgccagcaccgctgatgttgtcgacgcaacgaccgcagatttccgggtgctcagggttcacgccaacgtcttcacggcaatgccagcaacgggcgcatttcgggaaggccgacttgaccactttaagcttcagacccggaacttccgtggcaaccgcatccgccggggcttgggcaaatggcgccaggctcgcggtggaggtaatcagcacgaagcgcagttcattgctcagcttggccaggtcggcggtcaggccttcctcggcaaacagggtgacttcggcttgcaggttgccaccgacggccttggccgcacgctgcacttccagctccttgttcaccgcgaccttgacggccatcacgccttcccagtactcacggcccagttcgaagtctgccggcagctcggtcaggccttcgtaccaggtgttgagcatcacggactcgttgcgctcgcccggcaggtattcccacaactcgtcggcggtgaaggccaggatcggcgcgatccagcgcaccagcgcttcactgatgtggtacagcgcggtctgggccgaacgacgcgccttgctgttggcggcggtggtgtactggcggtccttgatgatgtcgaggtagaaaccacccagttcctgcacgcagaagttgtggatcttcgagtacacgttccagaaacggtattcaccgtagtgctcctgcaactcgcgctgcagcaacagggtacggtccacggcccaacggtccagggcaagcatgtcctcggatgccagggtgtcggtggccgggttgaaaccggtcaggttcgacagcaggaagcgtgcggtattacggatgcggcggtaggcatcggcgctgcgggccaggatctggtccgacacggcgatctcgcccgaataatcggtcgacgctacccacagacgcatgatgtcggcgcccagggtgtcgttgatctttttcggttcgatcacgttcttcagcgacttggacatcttgcggcccgtctcgtcgacggtgaaaccgtgggtcagcagttcgcggtacggcgcgtggttgtcgatagcgcagccggtcagcaacgacgagtggaaccagccacggtgttggtccgaaccttcgaggtacaggtcggcacgcgggccggtctcgtggcccatcgggtgcgaaccgcgcagcacgtgccagtgggtggtccccgagtcgaaccagacgtcgagggtgtcgctgatcttgtcgtactgcggcgcttcatcgcccagcagttcggcggcgtccagcttgaaccaggcttcgatgccttcctgttcaacgcgctgggcaacgatttccatcagttcgacggtgcgcgggtgcagttcgccgctttccttgttcaggaagaacgggatcggcacgccccagttgcgctggcgggaaatgcaccagtccgggcggttggcgatcatcgagtgcaggcgcgcctggccccaggccggaacgaacttagtgtcttcgatggctttgagcgaacgcacgcgcagggtgtcgccgctggttggctctttgtccatgccgatgaaccactgcgcggtggcgcggtagatcagcggggtcttgtggcgccagcaatgcatgtagctgtgcttgatggtgtcggatttcaccagcgcaccgacttcgctcagcttttcgatgatcgcagggtcggccttgaagatgaattgaccgccaaagaactccagcgacggcgcatacacaccgttgctttgcaccgggttgatgatgtcatcgttgaccatgccgtacttcttgcagatcacgaagtcgtctacgccataggccggcgaacagtgaacgatgccagtacccgaccccagttcgacgtagtcagccaggtaaaccggcgacaggcggtcgtagaacgggtgacggaagttgatcagttccagcgcagagccggtggtggtggcgatgaccgaaccttgcagctcgtaacgggccaggcaggcttcaaccatttcctcggccagtaccaacaggcgatcaccgacgtccaccagggcgtaggtgaactccgggtgcacgttcagcgcctggttggcggggatggtccacggtgtggtggtccagatcacgatggccgcgggcttgctcaggcttgccaggccaaaggcctcggccagtttggcctcgtcggcgatcgggaaggccacgtcgatggtcgaggacttcttgtcttcgtactcgacttccgcttcggccagggccgaaccgcagtcgaagcaccagttcacaggcttgaggcccttgaacacgaaaccgcctttgacgatttcggccaaggcacggatttcaccggcctcgttcttgaagttcatggtcttgtaagggttgtcccactcgcccaacacgcccaggcggatgaattcggacttttgcccttcgatctgctcggtggcgtaggcgcggcacagttcgcgggttttatccgcgcccaggttcttgccgtaggtcacttcgactttgtgttcgatcggcaggccgtggcagtcccagcccggaacataaggcgcgtcgaagcccgacagggttttcgaacgcaggatcatgtccttgagaatcttgttcaacgcatgaccgatgtgaatcgtgccgttggcataaggagggccgtcgtgcaggacgaatttcggacgatccttgccaatttcgcgcaactttccgtacaggccaatactgtcccagcgctgcaggatctgcggttcgcgctgtggcaggccggccttcattgggaaggcggtgtccggaaggtttagcgtggctttatagtcggtcatttaaggctcttcggttagcgatgggcgctaggtgcggctagtgcacgggcggcggcgacatccgcattgatcgccgttttcaacgcctcaagggaggcgaaacgctgctcttcacgcagcttctggtggaaaaccaccgtcaaacgccggtcatacagatcaccggcaaaatccaaaaggtgaacttccaggtgggccttgccatcacctgcaaccgtgggcctgacgcctatgttggcgactcccggccacggttggccgtcgatgtcgacgctgaccaggtaaaccccggtcaacggtacacggcggcgcttgagttgcacgttggcggttggcgtgcccagttggcgcgccagcttctggccgtgcagtacccgcccggcaatacggaacgggcgaccgagcaaacgctcggccaatgcgaagtcggcagcggccagggcgttacgcacttgggtactgctcacacgcagaccgtccagttcgacggtttgcgcggcttcgacggtaaaaccctggttgacgcccgcatgctgcaggaaatcgaaatcgcccacgcggtcgcagccgaaacggaagtcgtcgccgacctccaaatgttgtacgcccaggccatcgaccaaaatacggtcgacgaactcagcggcgctcaggctttgcaggcgctggttaaaggccaggcaaagcacacggtccacgccctcctcggccagcaattgcaacttgtcccgcaggcgggccaggcgggccggagctgtttcgggagtgaaatattcccgcggctgcggctcaaaaatcaccacgcagctgggcacgcccaactcgaccgcacgttcacgcagccgggccaggatagcctggtggccacggtgaacaccgtcaaagttgccaatagtggcgacgcagccccgatgctcggggcgcaggttgtggagacctcgaaccagctgcataacgcgcttcttgctcataaagtggtcgattataaccacacacggccccggacgacaggcaacagaacaggccaaatggatcgaatcgataaaacaaccgttttatcgcggcaaagtctctatcccaacgacttgcgattgaaatcccgcaggcggaagccctgcaacagcaacatcccgaagtaaaccactacaccggcgactaccagcacgccaaggcgcatgaagcgctccagcatgtgcccctcgtcccaggcgggcatgaagtgcatcaagcccagcagcacggcggacatcgcccctaccgccaccaaaagcttgagggcaaacatcccccagcccggctgcggctggaacatctgctgcttgcgcagttgatagaacagcagaccggcgttgatgcacgcgccagcgctgatagccagggccagcccggcatgggccagcgggccgataaacaccaggttgagcaattgggtgacgatcagtgtgaataccgcaattttcaccggcgtacggatgttttgctgggcgtagaagcccggcgccagcactttgatcacgatgatgccgagcaggccgacggaataggcgatcagcgcacgctgggtcatggaggcgtcaaacgcgctgaattggccatattggaacagcgatacggtcagcggctcggccagaatccccagcgccagggagcacggcaataccagcacgaagcacagccgcaggccccaatcgaggatacgcgagtattcctgacggtccttgctggcgtaggtgcgcgacagggttggcagcaaaatagtgccgagggctacgccgagcacgccggacggcaattccatcaggcggtcggcgtagtacatccacgacaccgagccggagaccagcagcgaggcaaatgccgtgttgataatgagggaaatctggctcacggaaacgccgaggatcgcaggcagcatattgcgcatcacgcgccatacgccggtgtccttgagattcaggcgtggcagcacgagcatgccgatctttttcaggtgtggcagctggtagagcaactgcgccaagccaccggccaacaccgcccagcccagggccatgaccggcgggtcgaaatacggcgtaagaaacaacgcgaaaatgatcatgctgacgttaagcagggtcggcacgaaggcgggcaccgagaagcggttccaggtgttgagaatcgccccggccagcgacgacagggaaatcagcaatatataaggaaaggtcacccgcagcagatcggtggtcagtgcgaatttttccggcgtgttggcaaaaccgggcgccgtggcccagatcacccagggcgcggcgagcatgccggcgatggttaccagcatcagcaccagggtcagcaaacccgatacgtaggcaataaaggtgcgggtcgcctcctcaccttgctgggtcttgtattcggccaggatcggcacgaatgcctgggaaaacgcgccctcggcgaagatccgccgcagcaggttgggcaacttaaaggcaataaagaacgcatccgtggccatgctggcgccgaaaatgcgcgccagcagggtgtcacgcacaaaccccaaaacccgggagatcatcgtgatagagctgacggcagccaacgatttgagcagattcattgaaagagtttgcgcctttagataaagagcaggcgaacaacgcgcctacttatgcgatactgcgcgcctgcaacagcacagagccaaagctcgcgagtttacaggtcaagcgccggaaataaatcacccgcctcttcagatcgaccactcagcagttcgcatcagccgcccttgacaacccatcaagtcatcggcatgattcgcggcctattttgtttgctatttcctaaaaagtctttcgaggagctcgacggtggccaacacaccttccgccaaaaaacgtgcaaaacaggctgagaagcgtcgcagccacaacgccagcctgcgttccatggttcgtacctacatcaagaatgtagttaaggccatcgacaccaaagacgctgaaaaagctcaagcagcttacgttctggctgtgccagttatcgaccgtatggccgataaaggcatcatccacaagaacaaggccgctcgtcataagagccgcctgaatggccacatcaaggctctgaacgtcgctgcagcagcctaagtggtaacaactgccgcgtaacccaggttacgcaacagttaagaaatgccccggaccgaaaggtccggggcatttttgtttgtgcctgatttatgggccgcacagatccaaatgtgggagcgggcttgcccgcgattgcggtgggtcagcggtgaataacgtggctgacacgccctcatcgcgggcaagcccgctcccacatttggatcgcggtgaatttcaggcaaaaaaaacgccccgaacaggtcggggcgtttttgctaccgattgatcaaaccacaatcaatggtggtgaccgccttcaccgtggacgtggccgtgggccacttcttcctgagaagcgtcacggatggcaacgatcttcacctggaagttcagacgctggccagccagagggtggttgccgtcgacggtcacatcgtcgccgtccagatcacggatggtgacgatctgcatttggccgtccggcgcggaagcgtggaactgcatgcccacttccagttcgtcaacgccttcgaacatgctgcggctcagggtgctgaccagctcggccgagtactcgccgtaggcatcttcaggttctacggcaacggtcagttcatcaccaacgcttttgccttccagagccttctccaggcccgggataatgttgcctgcgccttgcaggtagaccagcggcgcgccgccggcggagctgtcgatgacctcaccagcgtcgttggtcagggtatagtcgatggagacagccttgttagcggcgatcgtcatggggcgagaccttttgcataagaatgaagaacggacaagtctaaacaaggatttgcccgaaagcgaacagaacccggacagacgggaccgatcaacggcatccttcatcattggcttccaccaggatgaagaccagcactgggtcgccgagctgtcctgcggccacacccagcacctgcgccaccagccgccatggcagtcccgcgcctgggtgctcgacgccgcacaacgccttgaaaaaataggccaaccctttgcttgcggctggtgtgcgcaacagcacgaataacgataaccttggcacctgattcgcggtaggcgcccagccatagggcgccacccaagccatgcaccttcagagaattcgcatgcagactttttttatcgcgcccaccgattttggtgtgggtctgacctccatcagccttgggctggtgcgtacccttgagcgagccgggctgaaagtcggcttcttcaaaccgattgcccaaccgcaccctggcgacaccggccctgaacgctccaccgaactggtggcgcgcacccacggtttgaagccgccgcaacctctgggcctggcccatgtggagcgcatgctcggcgacggccagctcgatgaactgctggaagaaatcatcacgctgtaccaacaagctgccgtgggcaaggacgtgctgatcgtcgaaggcatggtgccgacccgcagcgccagctatgccgcgcgggtcaacctgcacctggccaagagcctggatgcggaagtgattctggtctccgcgccggaaaacgaagtgctcaccgagctctccggccgcgtggagttgcaggcccaactgttcggcggtccgaaggacccgaaagtgctcggcgtgatcctcaacaaggtgcgcaccgacgaaagcatggaagccttctcggcgcgcctcaaagagcattcaccgttgttgcgcagtggcgacttccgcctgctcggctgcatcccctaccagccagaactcaacgccccgcgcacccgcgacgtggctgacctgatgggtgcgcagatcctcaacgccggcgactacgaaagccggcgcatgaccaaaatcatcatctgcgcgcgcaccatgcgcaacaccgtggaactgctcaagcccggcgtactggtggtaacgccgggtgaccgcgacgacatcatcctcgctgtcagcctggccgccatcaacggcgtgccgctcgccggcctgctgctgaccagcgacaccctgcccgacccgcgcatcatggagttgtgccgtggtgccttccaggcggggctgccggtgctgtcggtgagcaccggctcctacgacacggcaaaccagctcaacagcctgaacaaggaaatcccgattgatgaccgtgagcgcgcggaaatcatcaccgattttgtcgccagccacctcgatgcacgctggctgcaccaacgctgcggcacgccacgggagatgcgcctgtcgccggcggtgttccgctatcagctgattcagcgcgcccaggccgccaacaagcgcatcgtgctgcccgaaggcagcgagccgctgaccgtgcaagccgcagccatctgccaggcccgaggcattgcgcgttgcgtgctgctggccaagccggcggacgtggaagccgttgcccgagcccaaggcatcgaattgcccgaaggtcttgaaattctcgacccggacctgattcgtcagcgctacgttgagccgatggttgcgctgcgcaaaagcaagagcctcaacgcgccgatggccgagcagcagttggaagatacggtggtgattgccaccatgatgctcgcactggacgaggtagacggtctggtgtccggggtcattcattccaccgccaacactattcgccctgccctgcagcttattaaaacggcgccgggctgcaccttggtatcgtcggtgtttttcatgctgttccccgaacaggtgctggtgtatggcgactgtgtgatgaacccgcacccgagcgccgccgaactggcggagattgccctgcaaagtgccgactcggccgccgccttcggcatcacgccgcgtgtggcgatgatcagctattccagcggcgattcagccagcggtgaggaagtggagaaagtccgcgaagccactctgctcgcccatgagcagcaaagctcgctgctgatcgacggcccgctgcagtacgacgccgccgccaatgaaaccgtggcccggcaattggcacctaacagccaagtcgccggcaaagccacggtgttcgtgtttccggacctgaacaccggcaacacaactcacaaggccgtacaacgcagcgccgactgcgtgagcctcggcccgatgctgcaaggcctgcgcaaacccgtgaatgacctgccgcgtggcgcccaagttgacgacatcgtgtacaccatcgcgctgactgcgatccaagccgccaaccgacctatggatatctaaatgctggattttctacctgccgccgtgcgcggggtgatcgcgtcgctgttactggcgctgaatacgatcctgctgtgttcgttcctgttcatcgtcgcgctgttcaaggcgctgccgttcgccaaacgcttcagcgaatggctgatgaaccacacccatgaggcctgggtgaccaacaacaaaggctggatgaacctggtgcggcgcacgcgctggcacatcaccggccttgaagggctggactatcagcactcgtacctggtgaccagcaaccaccagagctgggtcgacatcatggtgctgcaatacgtactcaaccgacggattcgcccgctgaagtttttcctcaagcaggagctgatctgggtaccggtgattggcctggcgtggtgggcactgggctttccgttcatgaagcgctacagcaaagcctatctggaaaaacacccggagaagaaaggcaaagacctggaaaccacgcgcaagacctgtgcgaagtttcgcgacaacccggtaggcattttcaactttgccgagggcacacggtttacaccgggcaagcatgcgcagcagaagtcaccgtttcgctatctactcaaacccaaggcaggcgggattgcgtttgtgctggatgccatgggtgaacagttgaagtcactggtcaatgtgaccattcactatccggccgggcgccctggttattgggatttgctctgtgggaatgtgaaggacgtggtggtgcagtttgaagaagtgcagattcccgccgggttcattggcaagaattatgagcaggatggggagtatcgggcggcgtttcaggggtggatcaataagttgtgggaagacaaggatcagttgctggaaaagctgcacaaagatttcccagactgccactgatcgtcctgctggagcagattagtgtgggagctggcttgcctgcgatagcggtctgtcagttgatggatgtacagctgacccaccgctatcgcaggcaagccagctcccacattgaccgagtacacatttgagagaatgtaaaaagcccgccaccgagtgatcggtggcgggctttttagtccgcgtggcgcttagatcgcgccgcgcttgcgcaacagctccagcacttgcttgacgctgtcttccagcgacagagcctgggtgtcgatcaccagatcggcattcaacggcacgtcgtacgggaaggactcgcctgggatgttatccccaccggcggcgtacaggccttgcggatcacgctcggcgcacaccagcggcgatgcttgcacgtaaacggtcagcagacggtcgccgccgatcagcgccttggcctgttcgcggccttcggcatccggggcaacaaatgcggccagggtcagcaggcccgcttcgttgaactgacgcgccacgtgcgcggcacgacgccagttctcggtgcggccggcacggtcctgcggcaagcccttgttcaggtcgtgacgcaggttctgaccatccagcacgaacaccgcgcggcccatgtcgaagagcttgcgctcaacggcatacgccaaagtgctcttgccagcgcccgacaggccgctgaacaacacggtggccggctgctggccgaagcgcaatgcacgctcctcggtggctacatgggccaatttgccgtgctgcgccgcgccgccatggctgaccggtggcgcaatgatcatgcccgctgccacggtgccgttggtcaaacggtcgatgacgataaacgcaccggtggtgcggttgctgtcgtagccgtccaaggcgatggcagcgtcgaggctgaccttgacccggccaatttcgttcaactgcagcgaacttgccgggccttcggccagggtgttcacgtccacgcggtgcacgatgctggtgatcgaacccggcacgtagctggtggcgcgcttgatgtcgtatttcttgccgggcagcatcggttcttcggccatccacaccagcatggcgtcgaaggcgtcagtcacttgcggcacgttgtctgcatgcaccagcaggtcgccacgggagatgtcgatctcgtcttccatggtcagggtcacggcctggcctgggcctgcgtgttccagttcaccttcgaaggtgacgatggatttgacgcggctgctcttgcccgacggcagcaccacgacttcgtcgcccttgtgcacgatgccgctggccagggtgccggcgaaaccacggaagttcaggttcggacggttgacgtactgcaccgggaaacgcaggtcggtgtagttgcggtcgttggcgatctcgacggtttcgagaatctccatcagcgactggccggtgtaccaaggcgaacgctcgctcttgttcaccacgttgtcgcccttgagcgccgacatcggcacgaaggccagggtgcttggcttgaacgcgatgccatcggcgaacttcaggtagtcggccttgatcgactcgaacacgctttggtcaaagccgttgatgtccatcttgttgatggccaccacgatgtgcttgatgcccagcaacgaggcgataaaactgtggcgacgggtctgggtctgcacaccgtagcgggcgtcgatcaggataatcgccaggtcacaggtggaggcaccggtggccatgttgcgggtgtactgctcatggccgggggtgtcggcgatgatgaatttgcgcttggcggtggagaagtagcggtaggcaacatcgatggtgatgccctgctcgcgctcggcctgcaggccgtcgaccagcaacgccaggtcgatgtcatcgccggtggtgccggattttttcgaatcgcgggtgatggcttccaggtgatcttcgtagatcatcttggagtcgtgcagcaggcgcccgatcagggtgctcttgccgtcgtcgacgttgccgcaggtcagaaagcgcaacatttccttgcgctcgtgctggcccaggtaggcgaggatgtcctcgctgatcaaatcagatacgtgcgacatgacaaccccttagaaataaccctgacgttttttatcttccatcgagcctgcaccatcgtggtcgatgacacggccctggcgctcggaagttcgcgtcaggagcatttcctgaatgatgtccgtcagcgtctcggcttcggactccaccgcgcccgtcaacgggtagcagccaagggtacggaaacggactttctttttgacgattcgggctttgtcttcgtcggacaagtgctcaaggatgcgatcgtcgtcgatcatgatcaacgtgccgttcttctcgatcacgtcgcgttcggcggcgaagtacagcggcacgattggaatgccttcgaggtagatgtactgccagatgtccagctcggtccagttggacagcgggaacacgcggatcgactcgcccttgttgacgttgccgttgtagacgttccacagctccgggcgctggtttttcgggtcccagcggtgtttgctgtcgcggaacgagtacacgcgctctttggcgcgggatttctcttcatcgcgacgggcaccgccgaacgctgcgtcgaaaccatgcttgtccagggcttgcttgaggccctcggtcttcatgatgtcggtgtgcttggcgctgccgtgggtgaacgggttgatgttctgcgccacgccatccgggttgatgtgggtgatcaggtccaggcccagctcttcgaccattttgtcgcggaacttgtacatctcctggaatttccagcgggtgtcgacgtgcatcaccgggaacggcagtttgcccgggaagaaggccttgcgcgccaggtgcagcatcacggcggagtctttaccgatcgagtagagcatcaccgggttgtcgaactcggcggcgacctcgcggatgatgtggatgctttccgcctccagctgtttcagatgcgtcagtttgtcgaccatggctactcacggaaaaacgatcttatggacggccagcgggccgtgttcgagcggggcatgctagcacagcaccttcttctattcagggagctggctagatcgaaacggtatatgaatatgcctgcctgtttgggcttcctgtgggagctggcttgcctgcgatacaggcacctcggtcattcaggcaaaccgaggtgaggcaatcgcaggcaagccagctcccacatttgagccttggtgttctttagatcggattcgggcaatcgatgaacagatgctccagcgcaaaccgccgcgccaggtaatcgcccagcgcctgcacaccgtagcgctcagtggcgtggtggccggcagcgataaagctgatgtcgttttcccgcgcgctgtggaaggtttgctcggaagcctcaccactcaaatacaggtcgacacccgccgcaaccgcgtcgtcgatgtagccttggccaccgccggtgcaccagccgacgcggcggatcatttcgctgccttcgatcagcaacggctcgcgccccatcacgtcttgtacacggcgcgcgaagtcacgcggtgacaggggctcggccagagagccgaccaggccgacaattttcgggttgttcgggtccagcgggccttcgacggtaatgtcgagctggcgggcgagctgcacgttgttgcccacctccgcgtgcaaatccagcggcaggtggtaagccagcaggctgatgtcgtgcttgagcagggttttcaggcggcgctgcttcatcccggtgatgcacgggttttcgcccttccagaaatagccgtggtgcaccagcaccagatcggcctgggcttcaacggcggcatccagcagcgcctggctggcggtgacgccgctgacgatgcgcatcacctgcgggcgcccctccacttgcaggccattggggcaataatcggcaatttttacgctgccgaggtagcggtccgcttcctcgacgagggtgctaagggggacggccataaaagactcctaaatatcccgttccgaggcgctcgcagcctcgtataatgcgcgacattatgggcgctctcccgccccctgcaacctgtcaggacttacttgatgctcaaggcactgcgtttttttggatggccattgttggctggcgtgctgatcgcgatgctgattattcagcgttatccccagtgggtgggcctgcccagccttgatgtaaacctgcaacaggcgccgcagaccagttcggtagtacaaggcccggtgacttacgcagacgctgtggtcatcgccgcacccgccgtggtcaacctgtacaccaccaaggtcatcaacaaaccggcgcacccgctgtttgaagacccgcagtttcgccgctatttcggcgacaacgggcccaagcagcgccgcatggagtccagcctgggttccggggtgatcatgagcccggaaggttacatcctcaccaacaaccacgtgaccacgggcgccgaccaaattgtagtggccctgcgcgacggccgcgaaaccctggcgcgcgtggtcggcagcgacccggaaaccgacctcgcggtgctcaaaatcgatttgaaaagcctgccctcgatcaccatcggccgctccgaagcgctgcgtgtgggtgatgtggcgctggccatcggcaacccgttcggcgtcggccagacggtgaccatgggcatcatcagtgccaccgggcgtaaccagttgggcctgaacagctacgaggacttcatccagaccgacgcggcgatcaacccgggcaactccggcggcgcgctggtggacgccaatggcaacctgaccggcatcaacaccgcgatcttctccaagtccggcggctcccagggcatcggctttgcgatcccggtgaaattggcgatggaagtgatgaagtcgattattgagcatggccaggtgattcgcggctggctgggcatcgaggtgcagccactgaccaaggaactggccgagtcgttcggcctgacaggccgcccaggcattgtggtcgccgggatcttccgtgacggcccggcccagaaagccggcctgcaattgggcgatgtgatcctcagcatcgacggcgaaccggccggtgacgggcgcaagtcgatgaaccaggtggcgcggatcaagccgaccgacaaggtagcgatccaggtgatgcgcaacggtaaagagatcaagttgctggcggaaatcggtttgcgtccgccgcctgcaccggtgaaagaagaggaataacgttgccaggagcctgttcgcagactcctgtaacttgatgtttcaatggaaattcattctcactagacatgttatattgtttcaatatcgctattggaacgctctctcatgccgtctcgaaaaattgcccccatggccggcctcgccttgggtttgctgctcgaccccgcctacgccgaagacaacacgcttgaactggacgccatcaacgtcaccaccgacgcctatgagtctgccaccggcccggtcaaaggctaccgtgcgacacgttccgccagcgcaaccaaaactgacaccgcgattcgcgatatcccgcaagccatcagcgtcgtccctgcctccgtgctcagagacctgggcagcaccagcgtggaacgcgccctggaatttgccggtggcgtgtccaaacagaacaacttcggcggcctgacgctttacgaatacagcgtgcgcggcttcaccacctcggagttctaccaggacggcttcagcgccaaccgtggctacccgagcacgccggatgcagccaacatcgagcgcattgaagtactcaagggccccgccgccagcctgtacgggcgcggcgacccgggcggcaccgtcaatattgtcagcaagaaaccccagcctgaagccttcaccaccctgcaaaccagcgccggcagttgggaccgttaccgcaccgcgctggatgtgaatacgccgctggacagtgaaggccgcgtgttgtcgcgcgtgaacctggccgtggaagacaagcacagcttccgcgatcacgttgacgcccagcgcgtattcgtcgcgccgtctttcagttggcagctggacccggacaccagtctgctcgtcgaaagcgaattcgtgcgccacagctccaccttcgaccgcggcatcgtggcgccacacggcatgtcccgctccaccttcctcggcgaacccgacgacggcaacatccgcaatcacaacaaccgtctccaggccacgttggaacaccacctcaacgatgcctggaaactgcgcctggccagccactacaaacagggcagcctgtggggcgacgcctcggaaagccgcgcgctgaatgccgacggccacaccgtcaaccgccgctaccgcgagcgctccacgggttggcatgacagcattacccagctggaactgcgcggcctgtttgacatcggcacttggcaacacgaactgctggtcggcaccgaatacgaggactaccgcaagaaagaacgcgtgaccgccaccgccggcagcccttacgccatcgacatctacaagccggtctacggccagcccaaaccagacggcgcacgctccggcactgacttcttcgagcagacccaaagccacgcgctgaacctgcaggaccagatcatcttcaccgaccgcctgcgcggcatgctcggcgcgcgcttcgagcacttcgaacaacgcactgatgacttcgcccgcaaccacgccaagagccggcaaacccacgacgccctcacccagcgcgccggcttgctctatcagctcacgccgcaagtcggggtgttcgccaatgcctcaacctcgttcaagcccaacaatggcctggacgctgccggcaaatccttcaagccggaagaaggcgtgggctatgaagtggggatcaagagcgagctgtttgacgaccgcctgagcaccaccctcgccgccttccatatcgaaaaggaaaacgtgctcacccttgacccggccaccaacctcaaccgcgccatgggcaaggcacgcagccagggttttgacctgcaattgagcgggcaactcactgacgccatccgggtgatcggcgccttcgcctacatcgacgccgaagtcaccaaaggcgacaaggccattcccgccggcagccgcatcctcggcgtggccaagcgcagcggcagtctgttgggcgtgtatgaatttcaggatggcgtgttacgcggctccgacctgggcgcagcgttcacctatgtgggcgaccgctcgggcgaggccggcagcagctttgaactgccggcctaccacaccgtcgacctgctggcgcattacaaggccacgcaaaacgtcaccgtgggcctgaacctcaacaacctgttcgatgaaaagtactacgagcgctcctacagcaattactgggtcaaccccggcgagccgcgcaatttcaccgtcagcctgaccctcaacctgtaaaaaggacgccaccatgcaccttctcaaacccctggccctgatcggcctgctgttcgccgccgacgtatccgcccacggcctgtggaccgaacagcgtcgcggcaatatcgaagtgatctacggccacggcgccgaagacaacgcgttcaagccccagaaaatcagcggcgcctgggcctatgacgccagcggcaagatgattccggtgaccgtggaacgcctggccgaccacgcccgcctcaagccgctcaagccaccggctgtgttggcggtggcgctggacaacggcatgtggtcgcagacggccgataaaaaatggattaaccagggccgcagcaaggtcgaaggggcgatagcatcaacccagaccttcaagtacagcctggcgatctacgaacccggagccaaactgccggagttgaagcagatcagactgctcatcctgccggaagccgatccgttgaccgtagggccgggcaaatcactgccggtgcgggtactgctggatggcaagccggcggcgggggtcaagttggtcggcgactatcgcaatatgccgaacacgttgagcaccgagaccgacaaggatggccgggcccaggtgctggtgcgcaatgaagggttgaatgtgatttcggcgcaggtggaagtgccgctcaaggacaacccggatgtggcgacgcaggggttgtttacctcgctgacgttcttgggcgaacctcatcacgaataaacgccacaaaacaatgtgggagctggcttgcctgcgatgcaggcaccgtggtgtatcagttacaccgcgttgatgctatcgcaggcaagccagctcccacatttgatcgctgtcatttcagcgctaacggcgcccgctcgcacatcgtgttcagcgcctgcgcccactgcggatcatcattcaaacacggcaccagcaccaactcctcgccccccgcttcacggaactgttccagtccgcgatcaccgatctcttccagcgtctcgatgcaatcggcaacaaacgccgggcacatcaccagcagttttttcacgccttgttgagcgagggtttccaggcgggcttcggtgtagggttcgatccacttcgcccgccccagccgcgactggaaagccaccgaccatttatccgcaagcagccccatgcgcgcggcaaaatcccgcgccacgctgaagcactggccgcgatagcacgtcgcacgcacctgcgccgaggcattcgcgcagcaatcggtggcgccatcaaaggtgtggccggggttgagcttttgcaggtgacgctcgggcaaaccgtggaagctgaacagcaggtgatcgtagtcctgctgcaaatgcggcttggcgctcgccaccagcgcgtcgaggtattcaggctgatcgtagaagggttgcaggatcgcaaactgcaaatcgagctttttctcacgcaccacacggcgggcttcttccaccacggtggtgacggtgctgtcggcaaactgcgggtacaacggcgccagggtgacattacgaatgccctgggcggccaatcgggtcaacacgctttcaatggacggctcgccgtaacgcatcgccagttccaccgggccctgggtccactgcgtggtcatctgctgttgcaagcggcggctgagcaccaccagcggcgagccttcatcccaccagatcgaggcgtaggcatgcgccgactgctcaggccgcttgatcaggatcagcgacaccagcaagcgccgcaccggccacggcaaatcgatcacataagggtccatcagaaactgattgaggtagctgcgcacatcggccaccgacgtggacgcgggtgaacccaggttgaccagtaacaacgcgtgatccgtcatgcaacatcctatcttcagaggcggctggacaagtcttccagggccgcgtgcaactcagtgaactgaaaagtgaagccggcggccagcagccgttcgggcaccgccttttgcccgcccaacaacaaaccggacaactcgcccaacccgaccttcaaagcaaacgccggcatcggcatgaacgcggggcggtgcaacacccggcccagcgtcttggcgaactcaccgttacgtaccgggtgtggtgcgcaggcattataaggaccactggcgtcaggcttgtgcagaagaaaatcaatcagggcgatttgatcctgaatgtggacccagggcatccactgccggccattgccgataggcccgcccagcccgagtttgaacggcagcaacagccgcgacaaaaagccgcccttcgccgccagcaccagccccgtgcgcaccagcactacacgcacgcccaatgcttcggcgcgcagggcggtttcttcccaggcgatacacaactggctggggaaatcgtcctgtaccgggccgctggcttcggtgagttcgcgctcgccgccgtcgccgtaccagcctacggcggatccggagatcaatacggctggtttttgctcctggctctcgatccaccccagcagggtttcggtaaggccgatgcggctattccacagcaacgccttgcgctttttggtccagggcctgtcggcgatgggcgcaccggccaggttgaccaccgcatccacatggccgatcacatcctgcaaacgcccgacgcccaacacctcggcgccgcaccattgggcgacggtttcgggctcgcggctccacaccgtcaggcgatggccctgggcaagccagtgcaggcaaagtttgcggccgatcagacctgtaccgccggtcagcaaaatatgcatgggatcctcctcatgtaacgttcgccgcccgtcgttagtctattttataagcagggatcatttgtaatcgggcgtgggctgttgtttaaccataggccacgccgttagaacaggtacgccaaaacctataccaaaaaacaatattgtacagctattggcgtcggcgtagtctgtacccaacggtaaaacgaggccccccatgactgttcccatcgcgatcatcggcaccggcatcgccggtctctccgccgcccgagcgttacgagacgcggggcatgttgtacaactcttcgataaaagccgcggcagtggcggccgcatgtccagcaagcgcagcgacgccggcgctctggacctgggcgcacaatacttcaccgcccgcgaccggcgcttcgtcaacgaagtgcaacgctggcaaagcaacggctgggccgagcagtggaagcctcagctgtacaacttcaagtccggccaactcacgccctcccccgatgaacagatccgctgggtcggcacgccgcgcatgagcgcgattacccgcgcgctcctcgacgacttgccggtggaattcgggtgccgcatcactgaagtgttccagggcaaacagcactggaacctgctggacgccgacggcggcaaccacggccccttcagccatgtggtcatcgctacgccggcgccgcaagccaccgctcttttggccgccgcaccgaagctggccagtgctgccgccggcgtcaaaatggacccgacctgggccatcgccctggcctttgacaaaccgctggatacgcccatggaaggctgcttcgtgcaagacagcccactcgactggctggcgcgcaaccgcagcaaacccgggcgcgacactgccctcgacacctgggtattacacgccaccagcacctggagcaaggcccatcttgacctgcccaaagaagccgtgatcgaacacctgcacggcgcctttgccgaactgctgcacagcgccatgcccgcgccgtcgttcagcctggcccaccgctggctatatgcacggccctccagcagccacgaattcggcgtactggccgatgccgacctgggcttgtatgtgtgtggcgactggtgcctgtcgggccgggtcgaaggtgcatggctcagtggccaggaagccgcgcgacgcttgatcgaacacctgcaatgaaccgtatcaacccggcaaaattgctgctgtcaaagtggacagcagcgcaccctcgaaacaaggaaaaacattttctggtcaccgagctgttccgtgatgaggaaggcacggtgctggaaatcgaactgcaagccatcatgacccgccgcgccgaacgcctggcttggcaaaccctgcaaaacgccgaggactggcgaatcggctggaaatagcctcgccgcaaatacttgtacaaaatatttgacttgtacagcatcaaacctatgatgagatttagttgtacaagtcttaagacctgtacaggaatcttgcagaggttcggccatgtacagcaccgtcaaaccgaagatcgccatcagcgcctgtctgttgggcgaaaacgtgcgcttcaacggcggccacaagcaatccctgctatgcagccagaccctcgccgattatttcgactttgtacctctgtgccccgaagtcgcaatcggcctgggcatcccccgcgagccgattcggctggtcggcgaccccgcccacccgcaagccgtcggcaccgtgcaccgcgaactgaacgtgacccaacctctggacgattatggccagcagatggcggccgagcacaccgacctgtgcggctacatcttcatgcagaagtcgccgtcgtgcggcctggaacgggtcaaggtctaccgtgaaaacggcacgccggtggatggcggaggccgcggcatttacgcccaggccttttgcgcgcgccaccccaacctgccggtggaggaagacggccgcctgaatgacccggtgttgcgggaaaatttcctgacccgggttttcgtctatgccagctggcaagcgttgctgcgcgagggcctcacccgtcaccgcctgctgaccttccattcgcgttacaaatatctgttgatggcccacagcccggcgcactacaaaagcctcggtcacctgctgggtagcatgaacaagggtgccgacctcgaagaactggggcacggctatttcagcgaactgatggccgggctgaaaaagtgcgccacccgtggcactcacaccaatgtgttgcaacacatcagcggctacctcaagcaagccatcagcgccgacgacaagcaagaaatgcaaaccgtgatcggccaataccgccacggcatcgtgccgctcgtggtgccactcacgctgctcaagcatcactttcgccaacacccggaccgctacatcgcgcaacaggcctacctgcaaccgcacccggaaaacctcagcctgcggaatgcgatctgacccatgaaccctgccctgcaagacgaacccggcgaggacatcgccaaagccctcgaagacggttggttgccgattcgtgaagtggcgcgccagaccggcgtcaatgccgtgaccctgcgcgcctgggaacgccgttatggcctgatcgtgccgcagcgcacgcccaagggccatcggctgttcagcgccgagcacgtgcaacgcatccacgccatcctgacttggctcaaccgtggcgtaccggtcagccaggtcaaaaacctgatcgattccgcccagcttcccgacagtgtcgaaaatgaatggcatgcgctacgccagaacctggtgacggccatcagcgaactggcggagcgccgggtcgacgacgcattcaatcaagccatggctttgtacccgccgcgcaccttgtgcgagcaattgttgctgccgctgctaaaggagctggagcaacgctggcagggccagttcggtgcacagatggagcgcgtgtttttcctgtcctggctgcgcagcaagttcggtgctcgcatctaccacaacaaccgccagttacagggcgcaccgctgttgctggtcaaccattccgatttgccactggaaccgcatgtgtggctgagcgcctggctggccagcagcgcggactgcccggtggaagtattcgactggccgctgccagccggtgaactggccctggcggtggaacacctgcaaccgcgtgccgtcctgctgtattcgagcaaggccctccacttgtcggcacttccaaaacttttgggtggcgtcagttgcccaatgctgattgccggaccaacggtatgcatccaccaagccgagttggccgtattaacccgtgacacccctgaattgttcgtggccgaagacccgttatcggcccaccagctactgatccagcgtggaatcgtttaaatgcatttgatctggctgcgcaccgacctgcgcctacacgacaacaccgccctggccgccgcaagccagcgaggcccgattgccgctgtttacctgatcacgcccgaacaatggctggcccacgatgacgcgccgtgcaaagtcgatttctggttgcgcaacctggaaagcctgagccaggcgctgggcgagctgaatattcctttgctgattcgcacagcctcgacctgggaccaggcgccggatgtgctgagcacactgtgccgggaactgtcggtggcgtcggtgcacgtcaacgaggaatacggtatccacgaaagccgtcgcgatgcagccgtagccaaggccctggaagccgatggcgtgagcttccacagttacctcgaccaactgttcttccaacccggcagcgtgttgaccaaaaccggcacctacttccaggtgttcagccagttccgcaaagtctgctacacccgcctgcacagcgccctgccgcgcaccgtggccgcgcctgaagcccaggcgccgatcaagctcaacagcgatccggtcccaaaaacggtcgaaggtttccagacgcccagcgaaaccctgcgcgccctctggcccgccggggaagacgaagcccggcgccgcctcgacgccttcgccgaccagcagatcagctactacaaggacgaacgcgacttcccggccaagcccggcaccagccagctgtccgcctaccttgcggccggcgtagtttcgccgcgtcaatgcctgcacgccgcgctgcaaaccaacggcggcgaattcgaaagcggcgacatgggcgccattacctggatcaacgagttgctgtggcgcgagttctacaaacacattctggtcggctacccaagggtttcccgccaccgcgccttccgccccgaaaccgaagccgtggcgtggcgccatgcgcccaaggatctggcagcctggcaggaagcacgcaccggcctgccgatcattgacgcggccatgcgccaactgctggaaaccggctggatgcacaaccgcctgcgcatggtggtggcgatgtttctgaccaaaaacctgttgatcgactggcgcgagggtgagcgtttctttatgcgccacctgattgacggcgacctggcggcgaacaacggtggctggcagtggagctcctccaccggcacggactcggcgccgtatttccggattttcagcccgttgagccagtcggaaaaattcgacggcgaaggcgtgtttatcaagcgctggctgcccgagctggcggcgctgaataaaaaggaagtgcacaaccccgaggcggtcggcggactgtttggcgtggccgactatccgcgctcgattgttgacctgaaaaaatcccgcgaacgcgcattggccgccttccgcagcctgccctcgcgcgaagccgccggaggcattcatgagtgacttcctgcgcacattcgcccaagctttcaccacactcgacaagcacaacctgcacctgctcgacagtttgtacagcaaggacatcgccttcgccgacccgctgcacgaagtccacggcctgcccgcaatgcaccgctatttcgctgagctgtacagtaatgtcagccagttgcgtttcgatttccacggtttcgaccaagtggccgaaggcgaaggctacttgcgctggaagatgagtttttgccatccgcgcctggccaatggcaaggtcatccgggtcgaaggctgctcgcacttgatgtggcgcgacaaggtgtaccgccatcgtgactatttcgacgcgggcgcgatgctctatgaacacttaccggtcctcggccgcgtgattggctggctgaaaaggagaatgggatgagcaccacaccgccccgccgttattggttgaccggcgccagcagtggcatcggtgcttcattggccgtggagttgctcaaaagtggcgcccacgtagcgctcagctcgcgcaccaaaggcccgctggaagcgctcgcccagcgttttccggggcaagtccttgtggtggccggcgacttgaccaacagccagaccgtgcgtgaaatcggcgagcatatcggcgtggtctggggctcggtcgacaccgtgatccttaacgcaggcacctgtgaatacgtcgacgccaggcagtttgacgcctccatcgtcgagcacgtagtgcgcaccaatctgttggccagcagttactgcatcgaagccgcattgccgttgttgcgcgccgggcacaccccgcacctggtgggtgtggccagcgccgtgacctacctgccgatgccgcgtgccgaggcctatggcgcgtccaaggccgggctgcgctacctgtttgaatccctgcgcatcagcctgtcgccggaaaatatcgacgtcacggtgatcagcccaggcttcgttgacacgccgctgaccgaacgcaatgacttcccgatgcccttgagttggtccgccgataaagcggcacggcatatcttcgccaaactggaaaaacgcccactggaaatcgccttcccggccctgttcatcgccaccctgtggccgctgtcgaagctgcccaaccgtgcgcaattgatcatcggcaaacgcatgctgcgcagcccgccgccgcagaaggacgacctgtgaaaatcgccattgtcggcagcggcatcgctggcctgacgagcgcctacctgctcagccgccgccacgacatcagcctgttcgaggccggcgaccgcatcggcgggcacactcacacggtcaacgtgacggtcgagggtaaaccctatgcggtggacaccggcttcatcgtgttcaacgactggacctaccccaacttcattcgcctgctgggccagattggcgtgaggttcaaacccaccgagatgagcttttcggtgtgcgatgcgaacgaagggtttgagtacaacggcaataacctcaacagcttgttcgcccagcgccgcaatattctgtcaccggggttctggggcatgctgcgcgacattttgcgcttcaatcgccaggcgccgctggacttgcaggaacagcgcatcagtgccgagatgacgctgggggattacctcgaagccggtggctatggcccgcggttcattcggcattacatcgtgccgatgggcgcggcgatctggtcgatgtcgctgcaggacatgctcggtttcccgctgcaatttttcgtgcggttcttcaagaatcacggcttgctgtcagtgaacaaccggccgcaatggtgcgtcatcgaaggcggctcaagcagctacatcgaacccctgacccgcagctttcgcgaacaagtccgcctcaattgcccggtgcatcgggtcgagcgcaacagccaaggcgttgtgattcacagcgcggccggcaccgaggccttcgacaaggtagtgtttgcctgccacagcgaccaggcgctggccttgctcggcgacccgagcgacgctgaacaacacatccttggcgccctgccctacgccgacaacgacgtggtgctgcacaccgacacccgtttattgcctgaccgcaaactcgcctgggccagctggaattaccggttgatcggcaaggtacagagccaggccgccgtcacctacgacatgaacattttgcaaggcatcgacagcaccaccaccttttgcgtcagcctcaaccagacgccaatgatcaacccgctgaagatcctcgcgcgctacacctatgcccatccccaatacagcctggcagccgtggcggcgcaggcgcgttgggaagaactgcacggcacgcgccataccttttattgcggcgcgtactgggccaatggctttcacgaagacggtgtggtcagcgcgttgcgcgtggcccaggcctttggggaaaccctgtgaacagcgccctgtacagcggctggatcgcccaccgccggttttcgcccaaggctcacgcctttcgctaccgcatcgggctgctgtacctggatttgagcgaacaggacgaagtgctcggcctgtcgcccctggccggcgccagccgcttggcgcccttcggttttcgccagcaggattacctgcgtgaattgacgcgccacggcatcagcttgagcgatgccgtgcgccaggaagtcggcaaggcactggggcgtgagccccggggcgttatctgcctactgacccaggcccgcagttggggcctggcttttaacccggtgagtttcttctactgcttcgaggccgacggcagtctggccgcgatcctgtgtgaagtgaccaacaccccgtggcgcgagcgctaccactacgtgctgccggcgcaggcgttgggtgccgaacagcaccagcatttcgccgtggccaaggcatttcatgtgtcgccgtttttgccacgggacctggaataccgcatgagcttcagcccgcccgccgacaaactcggcgtgcacatggccgactggcaaggcgcgcacaaagtcttcgacgccaccttgagcctgcaacgagaagtactcaaccgcgccagcctgcaccgctacctgtggcgctttccctggatgaccgccaaaacctgcctcgcgatttactggcaggccgtgcgcctgttgcttaaacgcacaccgattttttcccatcaggccgccgatggcgcctctcgcaccgcagtcgggtataccaaggatcgccgccatgaaaacccctagcttatcggtcaaggccaaccgcctgaacgtcaacggcctgaccaccgcgctgttgcgcaaggccgtgctgcgccaactcagccaactgcgccacggccagttggtggtaattgaagagggcgaacgccaagtcttcggcgcccgggaagcgcacttgctgggggaaatccagattctggattcggcggtgtggggcctggtggcggccaacggttccatcggcgcgggcgaggcgtttatccacggctactggagcagcccggacctgaccgccgtagtgcgcgtgatggtcagcaaccttgaggtgcttgacgcgctggaaggtggcctcgcccgcctggcccggccattcactcaaggcctgcactggctcaaccgcaacacgcgcaagggctcgcaaaaaaacatcgccgcccactacgacctgggcaacgacctgttcgaagaattcctcgacccgaccatgatgtactcggcggcgcaattcctgacgcccgacgacaccctggaacaggcgcaactgaacaagctggagcgcatctgccagaaacttgcgctcaaacctgcggatcacctgcttgaaatcggcaccggttggggcagcatggcgctgtatgcggcgcagcattatggctgcaaggtcaccactacaaccttgtccaaagaacaatttgcctacaccgaaaaacgcatcgaagccctcgggctgcaaggccaggtcaccctgctgctgcaggactaccgtgacctcaccggcgagtacgacaagctggtgtccatcgagatgattgaagcggtgggccatcgttttctgccaacctacttcaaacagtgtgcgcagttgctcaagcgcgacggcctgatgctgctgcaagccatcaccattcgcgagcaacgcttcgaacaggccaaaaacagcgtcgactttatccagcgttacatcttccccggcggcgccctgccctgcgtgcagaacatgctgcagattgtcagccgtgacaccgacatgaacctgctgcacatggaggacttcggcctgcactatgcgaaaaccctgcgcctgtggcacgagaactttcgccgcgcccatggccgtctcgccgagctgggctacgatgagtacttcctgcgcttgtgggaattctatctgtgctactgcgaaggcgggtttatggagcgaacgattggtaccgcacagttgctgctggccaagccggcagcgatcaacccacccctgctcgggcgcttcagtgcttaaaccgctggccaacgccgtgctgttccagtgcggctggtttgcttgtgtgctcggcggcgacagccgctggctgttggtcgggtttatcgcgctggccatccacctgctgtggataagttcgtggtcggcgcaaggtcaggtgatactcgccgtgaccctgctgggtacggtggtagacacttcgttacgcacgtttggcgtctttcatttcagcattcccggcccattgatccccttttggctggtgctgctgtgggcgctgctcgcgaccacattggagcactgcctggcctggagcgcacagccatggtggcgggccagcttgttgggcgcagtgggcgggccactgtcctattacgcgggcagccaactggccggggtgagtttcggctacggcacggcgcccaccgtgataggcctggcgctgctgtgggcaatgctgtttcccttgctgcactggatcgcccgacaactggggcactgacgtccgtcagagcattcatacgcatccgacgcgcttgccttacactgcgcgcctatgacaaacatccctctcactccaattcccgaacccgccgtgacctgctcgacgtgcgcagcctgttgctgccagctggaagtgatgctgatcaccgacacgggcgtgccgcagcgcttcatcgataccgacgactggggcggtgaagtgatgctgcgcctggacgacggctggtgcgcggctctggaccgggacacgatgatgtgcacgatttacgaacgacggccgctgatttgccgggagtttgagatgggggcaccggagtgcatcgaggaacgccaggggattgcgacggcgtatcgctgattcccgaataaatggagattcataggtgggagctggcttgcctgcgatagcatcacctcggtgtcactgatggaccgaggtgatgctatcgcaggcaagccagctcccacagggtttgcggtgttttgaaaagttacagcggcaaggtgtagtgcagcgaatagctctctacgccatcgttattgctgctgattccggcgttggaataatgcgtggcacgaatgcccacttcatgcccgccggcaaaacgcagaccaaagcctaaacggtcttcaaactggaaggcctggccaatattgttgtcttcaactcgcgtgcgcgagaacaccgccacaccaatccccgcctcgatgtacggcttgaccttttccccggcaaactcatacacaaacacgggcgagaacgacaagctgctgacgctggcgcgtttgtcgccatcccagtaggtatatgcgccgctccaatagccggtcaaccggccggtatcgctctgccaccagcttttatcccagtccgatgtcagccccaggcgataggtcatggtcgaatcgctggtgctccccacacccaactccaggccggcggcctgggctgaaaccgagtgtcccaccacagcggccgcaatcgcagccaaacagaacaagcgcttcataagaaacaatcctttgagaacgaagttataaggtcttgtgcaggctatctcgctatagaagctggcgcatagacggaagttccagcttctaacgccggtatttcacgaatttttcacgcgccaaagcttcgcacaacgccggggtgtttccatagagtcggtaggatatttctgaggtgatcggcatcgccactggtccagaactgtgcaggttcaggattggcagtcgccagcaggtcacgctcgcccagcaaccgcttgagctgacgtgcgacggcagcgccggtgtcgatcaggatgatgctcgcagggagcatctgtgccaggagtggcttgaggaaggggtaatgggtgcagccaaggatgatggtgtcacaaccggcgctgagcagcggttcgacgtaaccctgcaacatctggcgcagggccgggctgcacaggtcgccggtttcaatcagctccaccagacccgggcacggctgggtgatgacccgtacgtcagtggcaaaacggtcaagcaaggctgcgaacttggcgctttgcagcgtgccggtggtggcgagtacaccgaccacgccgctgcgggtggcggcggcggcgggtttgaccgcgggctccatgcccaccaacggccagtcggggtagtcctggcgcaaatccgcaacagcggcgaccgtcgcggtattgcacgcaatcacaaacgccttggcgccccgctcgcggaaaaactcggcgaccacgcgcgagcgttgcaggataaacgccggggttttctcgccataagggatatgcccgcaatcggccacatacagcaacgactcatggggcaacagttgctggatttcatccagcaccgacaagccgccgacgccggagtcgaacacaccgatgggcgcgtccttaaccatggtgtatcccgcagacactgcagcccggatcacgtttgacgcgtaactcgcgaaaacgcgtggtcaacgcatcgatcagcaacaggcggcccaccaacggctcgccaaaaccggcgagcaacttcaacgcttccaacgcttgcaggctgccgaccacgcccaccagcgggccgaccacgccagcttcgctgcaggtcagttcagtgtcactgccgtgcccgtataagcagtggtagcacgggctgtcggcgcgacgcgggtcgaacaccgacaactggccttccaggcgaatggccgcgccactgatcaatggcttgccagcggcgacacacgcggcgttgaccgcctcgcgggtggaaaagttgtcgctgcaatcgagcaccacatccaccgccgccactgccgctgccagcgaatcggcgtccagggcactgcgatgggcgatcagtttgatctcggggttgatggcgcgcaggcggtgcaacgccgagtcgaccttggtctgcccgacgctgtcagtgtcatggatgatctggcgctgcaggttggtcaggtcgacggtatcgaagtcggccacgtgcaactcgcccacaccggccgccgccagatacagcgcgacgggtgcgcccaggccaccgaggccgatgatcaatgcacggccatttttcaggcgcaactgaccgtcgatgtcgacatgctgcaacagaatctgtcggctatagcgcaacagctcctgatcggtcagcacgggcggcgccccagggtaatgcgttcgtgattgccaaggtcgatgcggctgtggaccctttcaaagccctcacccgacaacaggtcacgcacggccgccgcctggtcgtaaccgtgttcgagcaacaaccagccaccggcattcagatggcccgagctctgctcgatgatcacgcgcaagtcatccaggccgtcgtggcccgccaccagtgcgctggccggttcaaagcgcacatcaccggcaaccaggtgcgggtcgttgtcggcgatgtacggcgggttactgatgatcaggtcaaaggtgtgaccttgcagggcgctgaaccaatggctgttcagcaccgtggcgtttttcaggtgcaggcgctggcgattgcgctcggccagggccacggcttccagcacacggtcaacggcggtgacctgccaggccgggcgttcgctggccaaggccaaggcaatcgcgccgctgccggtgcccaggtcgagaaccttggcaggcgtagccggcaacaattccagtgcggcctctaccagcaattcggtttccgggcgtgggatcagcgtgtgcggtgcgacctccaggtccagcttccagaagccttgctggccaaggatataggccaccggctcaccgccacggcgacgctgcagatagtcggcaaacttcagcgcatcttcgctgctgacgattttctccggccaggtgtgcaggtaactgcgcgatttgcccaaggcagcggccagcaacagctccacatccaggcgcgcggtgggcgaatccggcaggtcggcagcgcgcagcaggctggcgataatggtcatttattcacctgtttattcaccaatcgccgcgagttgatcggcctgatactcagcgagcaacggctcgatcaccgcatccacgccaccggcgagaatttcgtcgagggagtaaagggtgaggttgacccggtggtcggtcacccggccctgggcaaagttataggtacgaatacgctcggagcggtcgcccgaccccaccagcaatttacgctcgctggcaatcgcattggcggcggcgctggtctgctggtcgttgagcttggccgacagccaggacatcgcccgcgcgcggttcttgtgctgggaacgttcttcctggcactccaccacgatgccggaaggcaagtgggtgatacggatcgcggagtcggtcttgttgacgtgctggccaccggcccccgacgagcggtaggtgtcgacgcgcaaatccgccgggttgatctcgatggcttcctgctcgtccggctcgggcaacacggccacggtgcacgcggaggtgtggatgcggccctgggattccgtcgccggaacccgctgcacacggtgcgcgccggattcgaacttcagcttgccgtaaacgttgtcgccttcgacccgcgcgatgacttctttatagccgccgtgctcaccttcgttttcagacaggatttccacgcgccagccgcgacgctcggcgtaacgcgaatacatgcggaacaggtcgccggaaaaaatcgccgcctcgtcgccaccggtgccggcgcggatttcgaggaacacgttgcgcccgtcattcggatctttgggcagcagcatgcgttgcaggtcgccctccagcgccaccagtttttccttcgcttcacggacttcttccacggccatttcgcgcatgtccgggtcgctgtccttgagcagcgcctgggcgccttcgaggtcggtctgggttttcagccattggttataggtggccacaatcggctcaacttccgcgtattccttggaataggtgcgaaatttggtctgatccgagatgacctcgccatcgccgagcaaggcggtcagttcttcgaaacggtcctggagcacgtccagtttattgagcagtgacgctttcattgcggttttttatccgaagagctatctgacgcgccctcaccgagggcaaagagttcttgggccatggccagcgcatcgaggcggccttcggcagtaagctttttcaactgcacgctgggggcatgcagcaatttgttggtcaggccacgggccaattgcatcagcacctcctcggcgctgccgccgttggccagtaaacgctgggccttggtcagttcttcgtcacgcaggcgttcgccttgctgacgataggccttgagcacatcgaccgccgccagctcacgcaggcgcaccatgaagtcttcggccccggtactgaccatttcctcggcggcctgggcggcaccctggcggctcttgaggttttcggcgaccacttcatgcaggtcgtcgacgctgtagaggtaaacgtcgtccaactcgccgacttcaggctcgatatcgcggggaacagcgatatccaccatgaaaataggtttgtgcttgcgcagcttcaatgcgctttctactgcgcctttgccaagaataggcaattggctggcggtggagctgatcacgatatcgctgcgcaccagctcagccggaatgtccgacagcaacaccgcatgggcgccgaactgctcggcgaggatgctcgcgcgctcgagtgtacggttggcgaccacaatacgtttcacgcccaggtcgtgcaggtggcgagcgaccagagtgatggtctctccggcgccgatcagcaacgcctggctgcgctgcaggtcgctgaaaatctgtttggccaggctgacggcggcaaacgccaccgacaccgggttttcaccgatggcagtatcggtgcgcacctgcttggcggaattgaacgtcgcctggaacagccggcccagcaacgggccgacggtgccagcctcacgcgccacggcgtaggcggatttcatctggccgaggatctgcggctcgcccaacaccagcgagtcgaggcctgaggcgacgcgcatcatgtgacgaactgccgcatcctcttcgtgcacataggcgcacgcacgcagctcgtcgaggctcaaatggtggaaatcggccagccagcgcagcaccacatccgctgaaagatgctcctgctctatataaagctcgctgcgattgcaggtcgaaaggatcgcagcttcgcggctgtcggtgatccggcagagctgctgcaaggcctcaaccaactgctccggcgtaaacgccacgcgctcgcgcacgtctacagatgcagtcttgtggttaataccgagtgcgaggaaggccattcaatatcgctgatgatgtcgggaagccgacaattgtcctacttcgaaagatccagaacaaccaccgtcgtctattgtcctaatgccttgtgtctattaaaggcgccaactgagactcggttatgtttggccgaaggcttgtgtcatgatgatccgaccgcaggttagtcgtcctcttcctatatgaatagatcttccgcgttgctccttgcttttgtcttcctcagcggctgccaggccttggcacccgtgtcgccggacggtacgccgccggtcgaagacagcactcccgcacctgaaaagcccaaggtttattcctcgttcaaggaagaaacgatctacagcctgctgactgcggaactcgccggccagcgcaatcgtttcgatattgccctggataactacgtgacccaggcgatcaacactcaggatccgggcatttcggagcgggcgtttcgcatcgccgagtacctgggcgccgaccaggctgcgctggacacgtcgctgatctgggcgaaaaacgcgccggacgacctggaggcccaacgcgccgcggctgttcaactggcacgcgccgggcgctatgacgactccatggtctatatggagaaagtcctgcagggtaagggtgacacgcatttcgacttcctcgcgctgtcggctgccgacaccgatcaggacacgcgcaacggcctgatgaagagtttcgaccgtttgctgcaaaagcatcccaagaacagccagttggttttcggcaaggcgctgttgttgcaacaagatgacgaagccgacgcagcgctcaagctgctggaacagaacccgccggaagacggcgagatcgcaccgatcctgctgcgcgcccgcttgctgcaaaacctcaaccgcggcaaggaagccattccgttgctggaaaaaagcatcaagaagtacccgggcgacaagcgtttgctgctgacctacgcacgcatgctggttgagcaggaccgcatggaggacgccaaagtgcagttcgccaacctggtccagcaatacccggacgacgacgaactgcgctactccctggccttggtatgcctggaagccaaggcctgggatgaggccaagggttacctggaagagttgatccagcgtgagagccatgtggattcggcgcacttgaaccttggccgtatagccgaggagcgcaacgacccgcaagccgccctgctcgaatatgcccaggttggccccggcaatgattacctgccggcccaactgcgccaggccgatatcctgatgagcaatggccgcaccgacgaggcggaaaaacgcctggctgccgcgcgcgatgccgaaccggactacgcgatccagctctatctgatccaggccgagaccttatcggccaacaatcagggcgagcgtgcctggaaactgctgcaacaagccttgctgcaatacccggatgatttgaacctgttgtacacccgggccatgcaggcggaaaaacgcaacgacctggcgcagatggaaaaagacctacgcctgatcatcaaacgtgacccggacaacgccatggcgctgaacgccctcggctacacactgtccgaccgtacaacacgctatgccgaagccaaggtgttgatcgagcaagcccacaagttgaacccggaagacccggccgttctcgacagccttggctgggtgaattatcgcctgggcaacctcgatgaagcggaacgcctgttgcgccaagcgttggagcgcttccccgaccaggaagtggccgcccacttgggcgaggtgctctgggccaatggcaagcaacgcgaagcccgtcaaatctgggaaaaattcctcaaggaacaacccgaaagccccatcctgcgcggcaccatcaagcgcctgaccggatccgagaccctttaagcttatgttcttgcgccacgttatcgttttcagtttcatcgccttgctcgccggttgcgcgggcattggcagccgtgaatccgttgagggccagggcaacccggcgcaatggcaacagcacaaggaccagctcagcagcattgatggctggcagatcgaaggcaaggtcggggttcgtgcgccgaaggattccggcagcggcaccctgttctggctgcaacgccaggactattacgacattcggctgtcgggcccgttggggcgcggcgcagcacgcctgacgggtcgcccggggcaagtcagcctggaagtggccaatcagggccgctatgaagcggcttcgccggaagaattgctggaacagcagatgggctggaagctgcccgtttcgcatctggtctggtgggtgcgcggtttgcctgcgcctgacagcaaaagtcgcctgagcctcaatggcgacagccgcttggccaccttggaacaggacggctggcaggtcgaatacctgagctacgtacagcagggcagctactggctgcccgagcgtattaagctgcatggcaccgaccttgacgtcacgctggtaatcaaggactggcaaccgcgcaagctggggcaataacgtgtccgtagaaaaactgactctgccctcccccgccaaactcaatttgatgctgcacattctcggtcgccgtgcagacggctaccacgagttgcagacgctgtttcaatttctcgattacggcgatgagctgacattcgccgtgcgcgacgatggcgtgatccagctgcacaccgaattcgaaggcgtgcctcatgacagcaatctgatcgtgaaggcggcgaaaaaacttcaagaacaatcaggcagttcgctcggcatcgatatctggatcgataaaatcctgcccatgggcggcggtatcggcggcggcagctcgaatgccgcgaccaccttgctgggcttgaatcacctgtggcaactgggctgggaccctgatcgcctggctgcgctggggctgacgctgggcgccgatgtcccggttttcgtgcgtgggcacgcagcttttgccgagggcgtgggtgagaaactcagcccggaataccccgaagagccgtggtatgtcgtgcttgttccgcaagtatctgtaagtacagcagaaattttttcagatccactgttgacacgtaactctcctcccattaaagtgcgccccgttcccaagggaaacagtcgaaatgactgcttaccggttgtagcaaggcgttatccagaggtacgtaacgctttgaatttgttaggtaaatttaccgaagcaaaattaaccggaactggaagttgtgtgtttgggggcttcccaagcaaagctgaagctgataaagtctcggcccttcttacagagacccttacagggtttgtagcaaagggaagcaacgtttcgatgttgcatcgcaagctgcaaagtctgctctaaaaggaaccgagtgttaggcactcgttgcaacagatacaggggcgtcgccaagcggtaaggcagcaggttttgatcctgccatgcgttggttcgaatccagccgcccctgccattttctaatactcatccaggttaccctcagcctctaggtactgcgcgtgtccaagatgatggtctttacggggaatgctaaccccgatctggctcgacgtgtcgtacgtcagctgcatatccctctcggtgacatttctgtcggtaaattttccgacggcgaaattacagccgagatcaatgaaaacgttcgcggtaaagacgtcttcattattcagccgacttgcgctccgaccaacgataacctgatggaactcgtcgtgatggctgatgccttccgccgctcctcagcgactcgaatcacagctgtaatcccttactttggttatgctcgtcaggatcgccgtccgcgttccgcacgtgtggctatcagcgcgaaagtcgtcgctgacatgctgaccgtggtaggcatcgaccgtgttctcacggttgacctgcacgctgaccaaatccaggggttcttcgatattccggtagataacatctacggctccccagtattggtggatgacatcgaagaccagcgctttgaaaacctgatgatcgtgtccccggacattggtggcgtcgtgcgtgcacgggctgttgccaaatccttgggcgtggacctcgggatcatcgacaaacgccgtgaaaaagccaatcactctgaagtgatgcatatcatcggtgatgtcgaagggcgtacctgtattctggttgatgacatggtcgacaccgccggcaccctgtgccacgcggcgaaagccttgaaagagcacggagctgcaaaagtcttcgcctactgcacacaccctgtgctgtcgggccgagcgatcgagaacatcgagaactccatgctggacgaactggtggtgaccaacaccatcccgttgtccgcagccgctcaagcctgttcgcgtatccgccaactggatatcgcaccggtagttgccgaggcggttcgccgcatcagcaatgaagaatcgatcagcgcgatgttccgttaagggtcaaaccttcggagcacccactgacgaaaagcgccccgccccgacattctgttggggcggggcttttttgcccatgtcgaggccggcgctggtcgcaaacgccgctcgatgatggctattttggagatacaaaatgactgactttactctgaacgcccaagcgcgtactgacctggggaaaggtgcgagccgccgcctgcgtcacgccgccaacatccctgctgttgtttacggtggcaacaagcctgctgaatccgtaaccatcctggccaaagaaatcgccaaactgttcgaaaacgaagctgcctacagccacgttatcgaactgaacgtcgatggcgccaagcagaacgtaatcgttaaagcgatgcagcgtcacccgtccaagcagttcatcatgcacgctgacttcgttcgcgttgtagctggccagaaactgaccgctatcgtgcctgtgcactttgttggcgaagaagcgccaatcaagaaaggcggcgagatttctcacgttgtgaacgaaatcgaagtgacctgccttccgaaagacctgcctgagttcatcgaagtcgacctgtcggctgctgaaatcggcgccatcatccacctgtccgacctcaaagcccctaaaggcgttgagtttgttgcactggctcacggtgatgacaaagctgttgcaaacgtacacgctccacgcgttgctccagaagctgaagaaggcgctgcagagtaattcactctgtattgccggagcttgaggaaacatcgcggaccggaacgtagcgagaaagcgggcgataacgcggcgtttactcttgagtaaatgagctactgttgtccactttcgccgcaccaaggtcaggcgatgttatccacaactccaaaggaagggcccctgtcgtgactgccattaaactgatcgttggcctgggaaatccaggcgccgaatacgaacagacccggcataacgcgggggccctttttgttgagcgcatcgcccacgcgcaaggtgtcaaccttgtggccgatcgcaaatattttggcctgaccgggcgcttctcgcaccagggtcaggatgttcgtctgctgattcccaccacctacatgaaccgcagcggtcaggctgtcgcggcgcttgcgggcttcttccggatcaaacccgaagaaatcctggtggcccatgacgaactggacctgccacccggtgttgccaagctcaagctgggcggcgggcatggcgggcacaacggcctgcgcgacatcatcgcgcagttgggtaatcagaataatttctaccgcctgcggcttggcattggccatccgggcgttgccagtatggtttcaaatttcgtcctgggtcgtgcgccacgcgccgaacaggaaaaactcgatgccagcatcgactttgccctcggcgtgctgccggatatcttcgccggtgaatggaaccgcgcgatgaaaaacctgcacagccagaaggcctgactcttaccgaggggaaacaccatgggattcaattgcggcatcgtcggcctgcccaacgtcggcaaatccaccttgttcaacgccctgaccaagtccggtattgcagcggagaacttccccttctgcaccatcgaacccaacagcggcatcgtggccatgcccgacccgcgtctggcggcactggcagccatcgtcaatccgaagcgcatcttgccgaccaccatggaattcgttgacatcgcgggcctggtggccggcgcgtcgaagggtgaaggcctgggtaacaagttcctggcgaacattcgcgaaaccgatgccatcgcccacgtggtccgctgctttgaagacgaaaacgtgattcacgtttccaacagcgtcgacccgaaacgcgacatcgaaatcatcgatctggaactgatcttcgctgacctcgacagctgcgaaaagcaactgcagaaagtcacgcgtaatgccaaaggcggtgacaaggacgccgtggtccagaaaggcctgctggagcaattgatcgctcacttcaccgagggcaagccagcgcgcagcctgatgaagaacatgagcaccgacgaaaaagcggtgatcaagggcttccacctgctgaccaccaagccggtgatgtacatcgccaacgtcgctgaagacggcttcgagaacaaccctttgctcgacgtggtcaaggccatcgccgatgaagaaggcgcgatcgttgtgcctgtgtgcaacaagattgaagcggaaatcgccgagctcgatgacggcgaagaaaaagacatgttccttgaggctctgggcctggaagagcctggcttgaaccgtgtgatccgcgccggctacgaaatgctgcacttgcagacctacttcaccgccggtgtcgaagaagttcgcgcgtggaccgttaaggtcggcgccaccgcgccacaggccgcaggtgtgatccacactgacttcgaaaaaggcttcatccgcgccgaagtaatcgcctacaacgacttcatccagtacaagggcgaagccggtaccaaggaagcgggtaaatggcgcctggaaggcaaggaatacatcgtcaaagatggcgatgtaatgcacttccgtttcaacgtgtaaacgttatctgcggtttacgccgacaacaaaaaaaagccgatgcaatgcatcggcttttttatgggcgacgattaaacacgtcgccagcactcgccggtcggtgcctttcatttttcgatgactcactctactcactgtcttgcgaaataaataaacctacgcctgtctaacttgtcctacatcgtccgcgcaagttcctactttaatgcagccagaaaaaacttatgctttccattctactgaaccgcgctgaccgttttatcactggcgcaaagcgataatggagcacccatccgatgtcggccgcccctctcagggaaaatgaaacagatatttcattgatcgaaaacccggatatcgaaaatacgctcctgagcaccgcacctctcaatatcgacattctgttattgggagaaaccggtaccggcaaggataccttggcccaacgaatacatagcctctcgggacgacgaggtaacttcattgccttgaactgcgcagccatcccggagagtctcgcagaaagccagttgtttggcgtcaacagcggcgcctatacaggcgcactgcaatcacgggccggcgtggtcgaagcggctcacttgggcaccctttacctcgatgagatcgacagcatgccgttgagcctgcaagccaagctgctgcgcgtactggagacacgtggcgtggagcgcctgggctcaacccgtttcattcctgtggatatgcgcgttattgcgtcagcccaacagtcgctgcttgcgatggtcgaacaaggcacctttcgccgcgacctgtattttcgactgaatgtcgtgagcttccagctgccggccctgcgcgaccagcgagaacggatcattccattgttcctggggatgatccagcaagaagccgagcgctacaaataccctgccccgacgccgcccggcgagttgctgcaacaattgctgtgtcatacctggcaaggcaatgtccgcgaactgcgctctgcagccaagcggttcgttctgggcctgccaccgctttacgccgcaatgatcaattcgcaggccgatgaaatgagcctgaaggcgcggctgcagcaaattgaaaaggcactgattgaagagtcactgcggcgtaacgaccattgtgtcgatagcgtggcaaacgagcttagagtcgccaaacggacgctttattaccggatgaaacagctcgaagtacagctcgcataaagcgttttgacctgactttgggaattggctgcttgtacttccatttacgccaggcaaaaaaaaatgtggcgaaacaattaaacacaaccgtcctcttgagacttggaacgtttcatctcttgcaggccacgtactcaacgagcaatttcaacattgctcggaaacgaccgatagtgatcaaccgctatcgaaccttatataaagctcaagaggtggatcatggcactaggcggcgtgggtactagcccacaagagatggctacaaaaggtatcgaagaacaaaaaaaatgggatggcgtgcaaaaaaccaaagaagaggctgaaatcgccaaattcaacgcgcagatcgccaacaccaaagcaatacgctactaagcagtttaagccttctcaactgccccgttgagaaggcttatttacgtggcacatcacgctcggtacttccgatagaggaacctatgctcatcacccctgctgacctgacaacgagcgcaaagatcgcaacgggatcggatacgcctgccgagagtcatcgctcttctgacctcaattttttcctggccgaaataaacaagaccgactcgtacgataaaagaagcccccgcgccgtagcctcggccgattcagccagggccatgggtgaaccgtcggcggaatcgaaaaatttgtccaaagggtttcgggacgccagcctgggcaagacgacgaagtacgcggacaaattccccgaatacctcgctaaagctcatgtcgaagccatctccaacgtcaaggtgattggcgcaatcgcaaaagcctgcgacaaaatttcaagcatggggtagatgcatgcaccgccgcctgagcacccttttatttttttcattggcgctattgctgactggttgcggtgaaagtgtagagctgcatcgcaatatttccgaacaggaagccaatgaagtcattgcagaactggccgacaagcagattcgggcccagaagattccaggcaaggacggcgtcgctgtccgcgttaaagccagtgacatcaaccgagccgttcgtacgctggacgccgctggactgcccaaggtggcgcgctcgacattaggcgatatctttcgcaaggaaggggtcatctccacgccactggaagagcgcgcccgctacatctacgcgctgtcccaggaactggaagcgaccttgtcgaatatagatctgaggggtggaagtcgttagtaaatcctgtacagtccgcgccaccttgtgaacccctctggaatagcggcttccatgcttcataaggcaattcattggaagtggtttaaggcagcggcatgaggttggtattcgcaacaaaagacctagcattagcaggtcgatcctttgaaggttttccgttactgattgggtcagagggattgccagtcgagccagctcaatccttcctttggcacacgcttatcgagtcaggtgaagccctaagcgttttgacttgggaggcctacggacgacgtctttacgattactttgccttcttggaagccaatgatctggcttgggatgaggaaagcctggcccacggtttgagtgttctgtcgagatatagggattggtcgagcggagaattggcactcgatcccggcaccgtgaacaatcgccttgccttgatcgttaggttctaccgatgggctaagcagcgcaacctgataaccacattgccctttggtgagaaaagggtaagagcgtgccaacattccggtcttctcagtcatatcgctcgtcccggagccgagagcacgaaagtctcggtgatggttcgcgaccgaaagcgcttaaccaaattcctgaccaaggatcaggtcaaggtatgccttgccctagataccgatgcaagtcatcagatattgttccacctgatggtgcgtacaggccttcgctcctgtgaagcacggtcttttccactcaaatatgtattcaaccctagattgaagaagggactgcgcccagggcaaatgattagtgttgctcttgacccttcagatatgcatatcaaatacgaccgacccagaactattgacgtcccatggtcgctgatggagagcatgtggtcttattccctttataagcgggaggttcgtaagtccaatggtaatgcaaatgttatcgcgttgctgctgactaatgaaggtaggcattattcaaaagattccgtggtggacgttatgaagtcctatgagcgaaagtgcggcttttatgttcgggcccatatgctacgtcacacctatgggacttataccttgcttgctcttcgaaaaagcaaagaatttgaaggggagccgctgttgtatgtcagagataggttagggcattcagatgtccaaacaacgatgatttacttgcaccttatcaatcagcttgaagctcaatccgtccttgcacacgaagacgaaattgacatgatgttcatggctgattccactaagcgcacctgaggtagttacgttggctcggcaaaaaaattacacggcggccctgcaatccgtcacgaaaggattcgagactgtcgaagacagcatcaagatcgacttgccgagaaatccgcgaagttataggcaaatagaccattctcaatacctaggtttgggtttcgatgcttgggcaattcaaagtattcacgttatcagagcattgctgcaaagtgggaacttctctgtgtcgactttgattggttactctgcaaatgggctgagatactttttgagttttctatgtggaggctcacttaaatcgccacctgcaacgccgaacggcctaactaagcgcgacttagaacgttatatctcttggctaaaacttaagtaccccaacggctcgacagctaagaaccactacaccagctttaagtctttgatcgtcgtgttggctgattatggttttatagaggctgctactgataaactcttgccaccgaacccatttccagacaacgcgcaaaacataaaatacgccgatccactttccatgggagaaatgcaaagactgctcggggcactaaagtcggatcttgttgacatccacaaaggtatgttccttggcaatggggcagagtcaatggcagtaatgttactaattacagcggcgagatccggaattaattctactccactattagaaatgacaagggatgccttaaagcctcacccgtttttgccaaattccaggttgataactactatcaagcgtcgaggtaaaggggcgcagatgaaaacgatacggcaaactaatctgctagataagtacagcgccattccactcgacggagttgcagtcttgaacaaggcccttgaaataagcaagccgctcgtcgcgctagcatccgaagagattagctcatatgtatggttgtaccgttctgggcagcggggtggggcaaataaaattgttgcccttacgtccagcactttatcggtgtctaccaaaaatatttgtgagcgtcatgagctccaagacgatgtaggtaatcggctccatgtctcgcttagtcgcctaagaaagacaatggaaagccgtttatggaagctgagcggaggaaacattcttgaagtttcctctgttatggggcatacactacaggttgcagataatcactacttgaaaataaatgatgaaatcaagaccgagggcgcgactttcattggtgagatttttccagacaggctccgcgggatcaatatcacgcctaccccgccaggcggttgccaagacagtctctacggtagtcgagcaccgaaggatggcgtcaatcactgtgttgattttatccactgcctcggttgccctagctatgcgattgtgggaacgtttgaagacttgtaccgattattcagttaccaaaaatttctttatgccgaagttgaatactttctctccgacgagtgggatacatggcgaaagcgccaacttgactacatccgaataatagacgatttcacatccaaaaaatttgatcttgcattagttttgcaagcaaaggcccaggctgaatcagctccgcatttgttctgggcaaaaaaaatcgaattcgtgaagagaaagctggacggtgagttttgatcataaaaaaaacgatcgaggcactaaaggcatatgatgttcttatcgcgcaaccggttacagcgaatggtctaagccccgcggatcgggatgccatcgtgatcagcgcgatcattaatgaagacggcgaaacgttggttctcagcaggtttggcgatgcacagtgggactttcgtccattttttaagcaggctaatgtttctcactgctttaaattcgtcaactgggacatgaatatgcctcgggcgcttattgacgactgcaaatcagttgcctatgcttggtttaaaagaggcatgcctagctctaaacctcctattgcacggggtgtcactaccttcgccgttgccagcgtcatgccttttgttcgttggttaaacaatttaggtatttcgaatttcgcagaagttcgtgcaatacatatcagcaattacgtttatcattgcagggatgagttaaagctaaggcctctccccctctatgggcgattacggattattgattttctttgggtattttccaacgatacggcttttccacttcagagttatccttggggtaattcgactctttggcggacttgcggaattgcgaatgtaataggcttggatgccaccaataaaaatgttggacggacagatatcattcctcctgcggaacaatctagaattttcaattattgcgaaaggattgttctggagatgagggccgaactggctgtcaacggcgttggttatcaccccagcgatgaacggttctcaactcgctgtagagatgctgtgctgtatattgtttcaatcactagcggtatgcgcaatgatgaggcaatagggattgaggtgggcgcttggcggaaagagttaaaaaacgggttttttttctactgggtggctaccgtcgaacataaaacaggtaaaggtcgagtcgaataccttgtgccagagcttacgcttgaagcattagctcttttggctagatattccgcgactatcagaaaggaattggatcgagaaatcagccagcttaaaagtaatccagaattatcaaattcaactgagcatctccttaggctcgaaaaagcgcaaaaggattcgaagaaactgtttttgggacgaactacacagggggggagagttcaagaaagctatcacgtcgaggcgctcagcggccaagcctccaatgctgcgtttgaccgtatagcaaaagctgctggaagcgattggccattgagaacacaccaatgcaggagaacatatgcacggtgcttcgtggagtcccgtatggggcgaacctccctaatctttctcaagtggcagttcaagcacagtagcatgagcatgactcaactctatgcatcaaatccgcagcaagacctgacactttttgatgagatattgcagcagatgacagagtttaaaattgatttgatcgaatcatggctcgataatcaacctttggcaggtggtgcaggcgaaaagatcgtggagctgcgagcaattccgatcaaggatagggcatcactgcttgctcaaacggcgccacataccaacattcgtgcgactggtcacggttggtgcattgcaacggagcggggttgcggcggcgctggtctatacgaagccacacggtgccctgggtgcaaaaattcggtgatcgatgaattcttcgctagcacctggcaggacatttacatccaacagcaagagctgatcaagattgaagacgctggccctgccgtgaggcagcgagcagagcgcgatttacaagtcgcactcgatgtcatcaccagcttgggtctctctcccataaacgctgacgcggacgagactgcaaatgaggaatgaggctactcaaaatcagtccctagtccgttcaaggtcgaagacccatgatgcacttgttaaggccattgatagcctcgtcgcaaggaacgaaaagctctctatcgcttcggttgcccgagcagtaggggttacgccggggctcatccataatacctacccagcggtggcagagaaaatacgcaatctgatgggtaagtcagtgcgcacacagcgtgattcaaagcaccaagcgctgatgaacgagaaggagaagaacagggcgctccgagcggagaataaccaacttctagacgagcttgccagaattgcttctgtaaaccagcgcctgctattcgaaatgactgaattaaaaggggttaccagcggaaaggttgtcgctctgactcagaagcccggtggatagtcctattcgcaattgacagtccaaagttgatcaagcggggattgtgcagcttggactaagcatctcgcgcttcattccccaatcaggggtcactgggacacgacacgtgttgtatcgtgcccctactccattttgcattatccaccacccgcatgaccttctgcgaggcggcgggctgcacactggcaaacagatcagggggggtactcgcttggctggcaaatctccaagagcaaaatctctggcttgctgaaggcaaatccaggttggtaaatcagctccattccctgaatcgccgccttggttatccgtaaacgcctctcaactcctcttactcaatgatcagcgtctgtctgggagcataaagatccctgctgcccgctactttctcattatgcgatcgtttaactcagttcctgaacaccaccgcttgccgtccttatgcatcgaccaagggttgtaaaactctcgtatatctcggggtgtgcgatctggagcagcttgtaggcgctggttttcggcgcggcgaaatgctcgatgccaacagtccttatcaaaagcttccgacttcactgtggtgataccgaagataggtgttttgcgtcggcttctgctcatcggatgcgctcagggctgagtaaggcgcatctggtgtgcaccaccctgaatctttcagagccggccagactatcaaggaatggtgaaaaccaaaagcttgacgcggcaccgtacgctgcctgagcaacacaccttcctgaccccgacgcctatcgcccctggatttgcagacacctcccatggtccgctcttggccggttagcgacggcctgacttcgaccgtcgctatgcatgatcaaacctcagtctgttccgccatctccagtgcgtcatcgacctcaatccccagatatcgaacagtgctctccagcttcgtatggccgagcagcaactgaaccgcccgtaggttcttcgttctgcgatagattagtgatgccttcgtacgtctcattgtgtgagtgccatacatggctggatcaaggcctacggctttcacccagcctttgacgatacgagcgtattgacgagtggatagatggtctgaggtatgcagccggctaggaaaaaggcagtcctcgctgcgtagttgtgcctgatgtatccaggccacgagagctgaccgtgtttgctcagtgatctcaaactccactggccgctgcgttttctgctgcatcaccatggctcgtgatgatacgtgctcgccatgggcgacatcgcgcacgcggagcttggttaggtcgcaggctcgaagcttactgtcgatggccagatcgaagagagccagatcccgggttctttccgcaatttgaagccttactcggatggcccagatatctctcagtcggagtggggctttctgcccgactagttttcctttgttccagggctgacggctgcaggtagcgatgatgttcatgacaagtcctccacgtgtggaaagacaaggatggctaatcagagcgacggtcgctaaccggccaaaagctgacgttcaagccgatcaagcgtcgccccaccaaacttgagctatctttcctgcgactcaccagcaaaaggtgatcccgcaagtaaggatgcttttatgaatcaatcaccccatcgcctgaacttgttcgcactgacactgctcggtgcattggcaaccacatccctgctggtgccacccagctacgctggcgaagcttccgttgccgggcctgtcgccggcaccaaggtcaccgaaccctatgtgcgcatgatggcgcgcgaagcgtatttctggggttggccgatggccaatattttcaaccgtcgccaggccttcaaagacctgcccgaaccgggcttgatgggtggcatcgttccggtcgcgccgatcaatcgactgtcgatgctcagtgattacattgatccggcggaacggctggtcgcatgcccgaatcaggatgtggtgtacggcgcgggcagcatcgcgctggatctggaaccggtcgtgctgcaagtgccggacttcggcagccgtttttgggtgtatcaggtggtggatctacgctccgatagctttgccgaactcggcaagatgtacggcagcaaacccggcttctatctgctggttggccctgactggaatggcaaggtgcctgcgggcatcaccaaagtctttcgggcacgtaccagcaccggcttcgtgattccccgagtgttccaggacgataccgcagccgaccgcacagccattcaagcgtcgctgtcgggcgtggacatgtacccgttgtcgcaatacgacggcaagatcaaacaccgggactgggcgaaactgccaaaattccccgcgcaggcggcgggcagcggcgaaaccaaatgggtgatgccggagaaattcttcgacgagttgccggcgctactcaaggacgccaaaccgttgccgggcgaagaagcccgttacgcgcaaatggcctccctcgcggccatcgccaaggctgatcctcaactgaaggcggcgatgatcgatgaagcgaaaaaagccgacagcgaagtgatcgatccgctgttgcagttccgcaactatggcctgcaactgccggatcactggagcaccatcagcaacggtgcagcgtttggcaccgactacttcagccgaaccgccgtggcgcgctcgaacatcttcgtcaatcaacagaaagagaccaagtacttctatcaggacctagacaagtccggcacgcgtctcaatgggcagaacagctactccgtgacctttgccaagggacaactgccgccggtgaaaggcttctggtcgctgacgctgtacaacgagcagcacttcttttccccgaatgacctcaagcgctactcaatcggcaccaagaacaaatccctgcaagccaatgccgatggttcgctgacgatttacgtgcagagcgaatcaccgggcaaggacaaggaaagcaactggctgccgacgcccaaaggtgccgatttctcgctgtatatccgcgcttactggcctgagcaggccgcgctgaacggccagtgggtaccgccagccgtagtaaaagccaactgaccagaacaggacgttcgcgatgaacacatttgcaaaatcactgactgcaacgggcctggccatgtcgatcagcctcggcgcccaggccgccacgcactatgagcagttggctgatctgccgttttccagcggctacccaacacttgagggcgtggcacaactgcaaaacgaattgcttttccagcgtgccgtgcagtcgtacatctgggcactgccgacgttgaacatgtatgccatgaaagaaggttcggaaaaagccttcggtgccggctacaacgtgctgccgatctggaaggaccgcctcaacgccaagacccgcgtcaccacgcccaattccgacgtgatctatgccatgggctatctggatctcaagcaggacggcccgatggtgatcgaagtcccgccaggcttgcagggcattctcgatgacttcttccaacggccgatctgctccgagggccagatcgaaggtcgccaatggtgtggtgatgtcgggctgccgggaccggacaaaggcaagggtgccaagtatctggtgctgccaccggactacaagggcgaggtaccgccgggctacctgacttaccgctcgcgcacttacggtgtgttcgtgttctggcgcggattcttcaaggacccgaaacaactggcggcaccggtcgcagtcatggagcagacgcgcatctatccgctgggcaaacaggccacggccaaagcgatggaattccccaacgcctcgaaaactccggtcaacatgctctacccctccgacggcagtgcgttcgacatgctgtcgcggttcatcgatcacgaatacgttgacccgcaagacatggaaatgcgcggcatgctcgccgctctgggcatcgtcaaaggcaaaccgttcaaaccggagtctgccacccgcgacctgctcgacaaagcagcgaaaaccgcgagcaagatcggccatgccatttcttacacgccgcaaaccattgtcaccaatggcacctggtatccggatcgcaagtggttgaacgtattccccggcaatgcgacgttcaccgccgacaccttcaattacatcgacccgcgcaccggttttttcaccaatgcctactcggcgagtccgggaatggcggtgaacatggaaaacgtcggtgccaagtacccggccactttcgtcgatgccaaaggccaattcctttctggcagcaacagctacttgctgaacctgcccaaaggcattcctgcggcgttgttctggtcggtgacggcgtatgactcgatcactgcatcaggcctggataacggccagccgttcccgtcgctgaacaccatggacaagcccgtcaccaacgccgacggctcgatcgatgtgcatttcggcccgaactcaccgggcgccggcaaaaactggatcaaaaccctgccgggcgaaggctacttcgtgattctgcggttatatggcccgaccaaggcgttcttcgacaaggcatggaaaccgggggacttgatcaaacaatgatctgagatgcgtctggacgacatgagtacattaatgcactcatgtcttcggcattcttaaccgacagctttaggtcgactgcagcccttcgcaagaggcagcaatcggccaatagctgcctgtcggaatcggctgaagtagccacaaagcggtcatctccgcgttccagtattattatgccggccttcggaatgtttataggtaggttgatccatggccagaagcgttaggcttcaaaaaaaactgcatacacggcatctgatggagacagctgaagaggtggtacttgatgatagccttgttggaaagctatgggcactcaatcaaggtgacagatttgagttgaattcagcttctctcagttctgcagttgttcaaaagtaccgcttggaatacgtgataacgagaggccctgttcctggacactggctatacacaaaatttgacccagaggaacttgtattattttttacggcaaaagactttgacggcatttgccatggctggactctgtttgacgagtgacaacctcagttttagctctctgagacgcagctctgggtcgatttcggtcagtcgtgacaggcagaaatcggccaatagcggacgctcacaaacgaccgctaccgacccaaaactgcccctcacagggggcagttttcggacatgaacggactgattgaaccttcttagcctgcaccttttcgagacttcggcatatccaggaaaaccggggagattcactcatctaagaactggcgcactgctccaattacctgccagcgattgcgctccataaacacgctgtgtgtgccttcgccgatttccacccagcgccggtagacggcattgatcagttttgaaaacaccgtacgggacatctccagcggacagtcacggtcaccgtcggcatgcacgatcagcaccggtaccctgatcatggccggatcgtatagtgaacgtccggcggcccagaattcgcgactgtcttgtacagtaccgttaggggccttgatctgtgtttcgcaggggccgaaggtagcgacggcccaggcttcaaaccaggcttcgggcagtacggcttcgtggcgttcggcgggtacgccattgagccagcgcgccttggcctcgctgcggttgacgattcggtaggcccccagtgcgccgccgctgtcggccaggctcggggtatcgcgaatccattgcggcgccaccagcaccaacttgaccaccttgtcgttgtgctcggcagtatagttcgccatcaacgaggtgccccacgaccagccaatcaagttgatacggctgactccgttgcgtttgcgcacaaaagccgcggccgtggcgacatcgtcggttgcaaccggtgtgcgtaccaccggtgggttgtctgcagcgggttgtgcaagctctgcgggtttgctggagcggccatacccgcgcacgtccaccaggtaggtgtcataaccctgttgcgccagttggtccatccaggactggccatcaagtggcaggtcaaacgtgctcgacgctggataggtagaacctgcgacgaacagcacggttttttcgcccgaccagtcggccatgtccgagcgccgtttgttgcgtacgtacagttcgatgcctggcgtaccactggggatcatgaattcggtacaggtaagtgctgtcattgagttgctcccgatcaagtcagataaaacgccagtcgaactggccgttcgcttcggtcacaaggcctgccgaagttttggcgaagtggctggtgaacacggtcaggccgcgcccggcggcctgttccagcaaccagtgacgtgaggctcgcgcctgttgtgggtggctgcaaaaacagctgttccactcggggcggaacacctgcaggggttggtgcatgatgtcgccgctgaaaatggccccttgggcgcggtgcaccagttcgatggccagatgtccgacgctgtggcccggcgtgggatgaatcagcaaggcgtcgccgatcaggccctcgttatcgacgatttgcgcctggccctgctcaatcaccggcagcacgctgtcttcaaacacgttggcgttgaagctgtcctgacctatctggtcgagccagtactcatgttccgcgcgggaaaaaacgtacttggcgtttggaaacgtcggcacccagcgcccatcgatcaggcgcgtgttccagccgcagtggtcggcgtgcaggtgcgtgcacattacgtagtccaccgactcgggcgtcacgcccgcttcgagcaggcgctcaagaaacggcagttgctgttgatgaaagcgcggcatgcccgggcgttccttgtggttgccggcgcagctgtcgaccaggatggtgtgatggggtgtcttgaccacccaggtatggatgctggcgataaaacgattcaattgcgggtcgaagcagtccggcaccatgaggcggtgatgctgttccagcgccaggggatcccagtcggggtacagcgcttcgggggcaaatccgggaccgcgttgttcggtcactcgcatcactgaaacgttgccgaaatggtaagtgtgcatggggtttgacctcctggctgtaaccggttgatgggtgaaaatgctatacagcttcccctccaccgtgaaatcgactcttgggatacggggcataaccgtcatgaatatcaccggccataatctggcgttgctggcctccctaagcaccttgctcgatgagcgcaacgtgacccgcgcggccgcacgcttggccatcagccagccggcgctgtctgcgcaactatcgaggttgcgtgacttgtttggcgacccgttgctcaccccggcgctgtcgggcaagggcatgatcctgaccccgcacggcgcgcggttgcaggagccgttgcgcctggccttgcaggcgctggaagacgtgatcaaccacacgcccgagttcgacccgctgaccgccgaccgcacgttttgcattgccgccaacgacaacggcggcgccatcatcgggccgcgtttgatccagctgacgcgtgaagccggctgccagggcattcgctttgcctttcgtagccttgataaggctaggctcgccgaacagctggagaacggcgaagtcgatgtggctctgaccggcaaagactcggtggccaaagcctctcagcagccgttgcttgaagaggaattcaggatggcccagcgcatcggccacccgcgcggtgcggggccattgtcgctggagcagtacacgcagcttgagcacgtgattgtatcgggtgatggcgggggcttttacgggtttgtggatgaggcgttggcgaagctggggtgcagccggcgagtgggcgtttcggtgcagtactacagcctggtgccggtgatgctgcaggcgacggatctggtgtgtacgttgccggctcagttcctggcgcggtatgccgaaaccctagagtctttcccgttgccggtgggggtgcggcgctacagcttgtatgcagcgtggcattcacggttcgacaaggacgcaggccactgctggctgcgcaccatgctggaggccgcggcccggccctgagccgcggcgctccaacggagttgtttacttggccggttgccagatgaagtgatcaccctcggctgcgattgtgccgatgccggggaacggaaagtgcggggcgaaaatggtctcatggctggcggccagtttcgtcagttctgcacgacgaatcttcacgccctcgtcttcatcattgtcaaaggtgatcgcccagtcaggcttggccagtgaaatgattgagctgtgcaccaggtcacccacgtccagtacacggtttttgccggattcgatctgataccccacatgccccggcgtatggcccttgagcggcacggagcgaatgcccggggccacgctgtcgcccggcgtgaaagtcttcacctgaggggtgatgatcctgatcaagtccgtcagttccggctgagtctggacccatttccagtccgggctggaaatccgtaccaccgcctttggaaaggcttgtttgccctcggctgtcgccaggccgccgatatggtcgctgtgcacgtgggtgatcagcacatcggtgatctgttcgggcgtatagccggccttggccaggctcgggatcaaaacgccttgagcgcttgggcccaggccggtgtcgagcagcaccgtgtgctggccgtccttgaccagcagcgcatcgatgcccagggtgatctgatcggtaggggcgcccgctgccgccaatactccggcaaccgcttgggtgccctgggtgctgccgaacaccttgccgtcgttaggcatgctgtgcactttgtcacgtagtgcggtgatcgtcagtgagccgaaagtgaaactatgggcggcggggccgtctgctgggtctgtttgcgcgaaggccactgagcaagtgatggctgacaacacggcaaaagccaagggtttaagcatggtggtgttctctggcgggaagaaggtgacttcggatgcctgaggatgctatcgcgcttgcgctggacgttgaaatccaaattcagcatatggggtataagcgctttgagtgggtgccgattaagctgaatagtcccgagtctcgtagagattttcataggccgcttgtggccgaccactgccggtcgaggctaccgaatgtgctggtcaagtcgaatgcaaatgtgtggccaggtggagtgcaattacgaaaccaaagccaaaaacacggaaaaatgttagcaatataaaacttataaaaatcagtaccttatactttaataactgttagggtcattcagatacaacgacggcgtgatcgtcgctcgagtgcatgtggtgttgcctgagcgggtagcccccggcgagcccgtacagccggcatcggcctctgtattcatcaagcatgacccgcgtctggaccccgacaatatcaacgcacgggtacgcaggatggtggccagcagtatccccggcatggcttcagccatagataacaccgtaaagttgaccgtcgttttcgtacccgccacgggctacaaggaaaagcagcaactcgcctatttgggcccgttcctgattccagagcaagaccttggattctggcgcagcgtcgcgctctcaccgttgatcgtcctcctgctggggggcattgcctgggtactttggcgtcgcaggacactgcaatacgcagcgccggaacctgcgattgcacaccgtcatgagtgacggtttgcgttgggtacggtggtgggcctttccctgggaaaatgcccacatcgactggttcacacgcaagggctttatcgaaacagcagcgctttcacgcgctcaccatgcccgggcaagccgcctgttcgagatcgaacccgaactgcccccgcctgcttccacggtcttgctgcaactggtattggcgagtgcgcaacaacgggacctcatactcacactcgtcaacgaggtatacaacgcgcctcacgacaaccggttgaatcaggaacagctgctttggtgccagcgcttggccaaggcactgccacccacaccggaaccggtgagcattggcgacccactgcaattcctgcgtgcctgggtggcccctgctatctggcaacgacttcgcctgagctttgcacgccccagagtgctcgagctggaacagcatcccaagccgaccgacacgcccacccggctggatacgctgtggcaagccgctatttggcgcgcaacttcaccgactgtcgatgaagctgcgcgtgctccccgtgagaaccctgaccatgttttgcacccacaagattgagctcaacgccctcccgcacgatttgccgacgcctctgattcccagagaaatactggccgagcatgcccagggccgccagctgctcgcacacgcccaagcacaggcgcaggcactcacaggaaacagccgaatccgtgtcgaggccgatgtgcgcaacaacgcgattctgatttatgacttgccggagcgccaggccatgtaccgcgagttgatcagccagctcgacgtcgcgcgcaagctggtggaaatcgacgcaatcatcctcgatatcgaacgcgagcaattacgcgaattcggcgtgacctggggctttcaaaacagccgtttctacggcggcgccagctccctggctcgcggtaccacctcacagttggctatcggtacgcgggatggcccaactggttccaaaggtgcgcgcattgctcggtaggcatctgcccgacgcccgccgggcgctgagcaagggttttagtgttgaacgccatttcccggacaaacatgtcagcaaggccaccagccgccgcggctgtttccggtaccggggaacggctgatcctggatggcacagggctctggggcacttgcacatcttgatagagttcaactttcatgggcatgccgagacaggaagagtatttccctctgtggcaagcggtgcctgaacggttccattgaaatccatgccacctgaccgttgaaagaagtggcacaagatctcaggactttctgctggaaattgcgcaaaaccgtatcaattacaaaatatttattataaaaatcaacctgttatgtgatttttccaattggcacaagcggtgctaacagggttttcgtcgaaacaatttcgatcgcgtctaccctgaggaaaaaatcatggatatccctattggtgctctagctcacttcgttggcagctcgcctgaattcatgctccaactgacagacgagcagcagaaaaaactccggcgttttattcataagcgcgtcctcaaccccgaggatgcagacgacatcctgcaactgacttacctggaagcctggcgcaaccgtgagaggttcggcggccaagccaccctcagcacgtggatgtgcggcattgcgcagaacctgatccgcaaccatttccggcgcctgtacgccaagccggtgcattgcgaatttgacgaatcgctgtggcacggcctggaagaaaacaaaaacctggactgggaattcgagatcaaccgccgcctggagaaaaccctgagcgccatcgaccacctgccggcggaaatgcgcaagacgctgtacgccacgctggaaaccgacggcagctaccaggacaccgccgacgtgttggacattcctatcggcaccgtccgttcgcgcttgtcgcgcgcgcgcgaacagctcaaacgcgttacccataactcgtcacaaccgtaagaccgccgaaaggcaactgttgggcggcagggatatctgcccaaccgaattcctcagtttcaaagacgcccgacgccacgccccccgcatcagatcaccgccgctggacactacacccgccataccactcgtcaccgtttagcctgattttggttaaacagttgaaagcgtagaaaaaatttcactaaaagtgcttgacgcattcccgttctgcgcgaataatgcgcgccacttggctacatagctcagttggttagagcatagcattcataatgctggggtccggggttcaagtccctgtgtagccaccaagtactaaaaacggcttaccgaaaggtaggccgtttttttatgccttcagaaaagtggtgaggcgctcaggcccggggcgcgcgggcgaggctcgcatctatctcaacatcaacagtgtgtgggccgccccatgcgcgcaaaaaaagccgccatctgtactttgacgctcagctgaacccgctgttagtgtccagcctcccccacacggagtgcctcacggtgaaactggatatctaccaagtcgacgctttcagtagccacgccttcggcggcaaccccgctgcagtgtgcccgctcaccgaatggctgaccgatgagcaactgcaaaacatagccgcagaaaacaacctctcggaaaccgcttacttcgtgccccgtggcgacatttacgagttgcgctggtttacccccgaagtcgaagttgacttgtgcggccacgccacgctggccgcagcctgggtgttgattcacaaactgccgggcgcgccgcaagtgttgcgctttgccacccgcagcggcgaacttcgggtgacgcgcaacggtgacgaactggcgatggatttcccggccaagaggcccgaacgttgcgaaccgccagccggaatgctcagcgcattgggcatcgaacaggcccaggtgtatgccaccgacgactacatcgtgctggtagacgacgaagcccaggtcgccgccctgacgccggacttcgctcgcctcaagggcctgcccaaacgcggaatcgcagtgacggccaaaagcacgcgctttgactttgtaacgcggtggttcgggccaaatgtaggcgtcaacgaagacccggtcaccggctccgcgcacacctcgctaacgcccttctgggccgagcgtttgggcaagttgcacctcactgccgaacagggcggcaagcgtcgtgggcagttgcgctgtgagctcaagggcgaccgcgtgatcatctcgggtgcagcggtactctatctgcaaggcacgatttacctgtaaaaagtacggcccaaaggacaacagatcattctcacaatgaacggagttcagcgcgtgttttcgatttcccgccgtcaactgtcgatgattgccgcagccctcgccctggctggctgtcacaaccccatcaacgaacagcctccggcgccggaactgggttcaggttttcgcaccgacctcaccacccagcacgccgaacatcacatggctgccgctgccaacccgcttgcggccgaggccgggcgcgagatgctgcgccagggcggctcggccattgatgcggccattgcgatgcaggcagtgctgacactggtggagccgcaatcctccggcatcggcggcggcgcgttcatcatggtgtgggacgggaaaaacgtacacgcctacgacggccgtgaaaccgcgccggccggagcgaccgagcggctgtttctgaaagccgacggcacgccgatggcgtttcccgaggcacagattggcgggcgctctgtcggcaccccgggggttttgcgggcgctggaaatggcgcaccagaaaaccgggcacctgcaatgggccaggttgttcgaaccggcgattcgtctggccgagcaaggcttcgccatttcaccgcgcttgcacgcattgatcgccgctgaccgctacattccccagtcgcccgacatggctgcttattttctgaatgccgacggcacgccaaaagccactggcacgttgctgagaaacccggcgctggcaaatgtattcaggcgcattgccaaggaaggaccgggcgcgttgtaccacgggccgattgcggatgagatcgcgcgcaaggtccagggccatcgcaacgcgggcagcctgtcgcaggcggacctcaagggctacaccgccaaggagcgcgcgccgctgtgcactgactacaagcaataccgcgtgtgcggcatgccaccgccgtcgtcgggagggattgctgtggcgcaaatcctgggcacgctgcaagctctggaagcccgagacccaaaactggccattgcgccaatgatacccgtgaagagcccgtcacccgccggcctggaacctgcgcccgaggccgtgcacctgctcgccgaagccggccgcctggtgttcgccgaccgcggtttgtacgtggctgacgcagatttcgtaccggtgcccgtcgcgggccttgtcgctgcagactacctggcccagcgcgccgcgctgatcggtgagcgcagcatgggcgtcgccaaaccgggccaaccggcaggcatccaggtcgcctacgcgccagaccgttctccgttgcgcatctccacctcacaagtggtggccgtggatgatctgggcggcgccgtgtcgatgaccaccacggtcgaagcggcatttggctctcacctgatggttcagggctttttgctgaacaaccagatgaccgacttttcgttcatccccgaagaaaacggccaaccggtggccaaccgcgtagagcccggcaaacgcccgcgctcagccatggcgccaaccttggtattcgaccgtaaaagcggcgagctgctggcgactgtgggctcgccaggcggctcgcaaatcatcgagtacgtgagcaaatccctggtggcgctgctcgactggaaactcgacccgcaggccgccatcagcctgcccaacttcggcagccgcaatggcgccaccgaattggaagcgggcttgttcagccccgcgctgaagcaggcactgagggccaagggccacgccctgagtgaaatcgatatgaccagcggcatccaggccatcgtgcgcacacgggacgcccagggcaaagcgtcgctcagtggcggcgccgaccctcggcgtgaaggcgcagcggtgggcgattgagtctttaatcaacggagagagcagcttgcaacaggcagataacctcggcgccatccctggcatcgaccacggcttttgtacgatcaacgacccaatgcgcccggacgatgtgtttttctgcaagcaggtgcacagcgcgtcagtcatcgaatggcagccgggccaagtggccaataccctcgaagccgatggcgtgtttacccatgagcatcagccgattgcggtgattaccgccgattgcctgccgattctgatcgctgcaaaaaacgctgaaaaagtcgcggccgtacatggcggctggaaggggctgcaaggcggaattgtggccaacgcgattcagcgattcgtcgacgaagggattgccgttgaccaattgcaggtggccatcggaccgtcgatcaagccgtgctgttatgaggtgagcgaggcgtttgttgcgcagttcccaatggatcaaaaacacctgtggcaacacacacaaccggcgccattgctagcgccgcaaattgctccgcctcatgccaggcaagttggcagtgcgtggtttgatttgagtgggtacggggtgatgctgttgctggcggcaggggtcaagcgggcgcagattgaggtcagcaaggtgtgcacttattgcacgtcacccagctttgccagctaccgcagaaggacacaccaccctgaggaaccgaagacgttgatttattcgtggattgcccgcaaggcctgaaaacgcctgtgaccggatttgggctgctgcgcagcccagcggaagcaagacatcctcgtcgcatcatttcagcggctgatcttcaatcccttacgccccgcatgccgttcttgcgccagttcgatcaagcggctcaccagttcgctgtagctcatccccgccgcctgccacagcttggggtacatgctgatgcgggtgaagccgggcagtgagttgatttcgttgatcagtacttcaccgtcctcggtcaggaacacatccacccgtgccagcccggcgcagcccagcacttcaaacgcctcgaccgccagacggcgaatgcgctcgctggcctcttcactgatatccgccggcaccacgacctgggcagcctggtcgtcgatgtatttgctgtcgtaggaatagaacccgttgctcaccacaatctcgccgcaaccgctggcaatggggttttcgttgcccagtacggcgcattcgatttcacggcctttaacggcggactccaccaacactttttcgtcaaaacccagcgccagttcaacggccgcgtaatagccggcttcgtcggcgactttgctcacacccaccgaggaaccctggttagccggtttgacgaacatcggcaggccaagcttgcttgccgccgtttcgaaggatgtgcgcgcggcattgccacgcgtcagggtgatgaagggtgtgacggcaataccggcatcgcgcaacaggcgtttgctgatgtccttgtccatgcacactgccgagcccagtacgtcggagccgacaaacggcaagtcagccatacgcagcaaaccttgcaggcagccgtcttcgccgagggtgccatgcacgataggaaagatcacatcgatatgctgcagcaggctctgcccggaggtttcaaccacttgctggctggccttgccgggcaccaccgccagctcgcggttggacttgttgagggcgatgagggcggggttttcctggttgatcagaaagttcgacgtatcgttgaggtgccagtggccggctttatcaatgccgatcaacacaggctcaaagcgcgaacggtccagcgcatcgacgatattgcgcgccgattgcagcgagacttcgtgctcggccgaacgcccaccaaaaataatacctacccgcaccttgctcatgacccggcctcactgttgaaagtaaggcttcttaacacgggcagtcagcggttcgccaccagatgtgcaccgaacaacacgtagcaaccgccggcaaagcggtcgagccacttgcgtgaacggctgtaggcgctggccatgcgctggcttgaaaacaccagggccacggcgctgtaccaactgaacgacaaggtggacatcacgatcaccgccagggtcagcagcatcggtgacggcgacggcggcatggtggacgcaaaaatggtcgccacaaacagggccgacttggggttggacacgttgccgagcaaccccaggcgccaagccgaaaacagcgaacgccggggttcctccggcaacaggctttgcccggcggcgggcgccgaacgcttgaacagtttgagccccaggtaaatcaggtagcaaccgccgatgattttgaacgccaggtagagcatgggcgcggctgtgaacaatgacttgatgcccaaaccacccgccagcccccacagaacggtacccgtcgccacgccagccgaagccgccacgccatgacggcgcgagccgttcgcggccaactgggcgatattgaaaaagttggggccgggcgttaccaccgcaacgatccagagcaaccccaaggacaccaatggtgccgcgtatgcccagttttggagtgacatgcagggtttcctctcacacagctgataagtcgttattgctcggtgcccgactccggcgtgtgcaccagcaagtcgccgggttggcactccaggtacgcacagatggcatccagtgttccgagccgtatccccttgaccttgccttgcttgagcaaggacaggttctgttcggtaattccgatggccgccgccaggtccttggatttgaccttgcgtcgggcaagcataacgtccaactcaatcacaatgggcatttcagtctcaaacaaaggtgcggttttcagagtccacttcactggcctgccagaggatacgcgcgatcaccgcaatacaggccgccaggaacaacgccacgaagctgggcgtggtcacactcagggtgatcaggcggtggccgaccggttcattcattgtcacccagacactgagcaatggctcacataaaaaatccagcaggacccagattgccactgctttgcccaccttgcccaggtgcgaggcggccttgctggagaagtattcgccccgcgcatagttctggaacagcttgcgcagatgattcaaaccggacgccagcgccagcaacggcacgctcgacagtaggatggcacccaggatctgccacaggggaaacaacgccacctgctcggcgcggccctggatcagacggtcactcaacgcgaagttgaacccaagcccctcgggcgaagaaccgaaaaccggaaacagccaaccggcggcgttaagggccagcatgctgatgatcagcaacagcgtgaccaccgacatgcgttggctgagttgggcaagacgttgtgtgttcatggacggcctcactgattgaatgtggaggcaaagtatcgaattaattatcgtaaaacaataattttttatcgataaataatgttttcatgtaacccgaagcgtccgcccacgcaccaaccgctgcacaatcgtacaagaccccaccagacaacccgcgcagactgggttaacgtgtttccatctctacatgtgacaagccaccatgggcaatccgacttccaccctcgactggctgcaccgcgccccgcacgccagcggcctggaccgtatcgaggcgtacttcgccggtttcgcattcgacccgcaccgccatgacacttacgccatcgggcgcacgttgttcggcgtgcagagctttcattatcgcggttgcatgacccacagcctgcccggcacgaccatggtgatccatcccgacgaaacccatgacggtcgcgccagcagcgtggaaggtttcaagtaccggatgatttatgtggagccggcgctgatccagcagattctgggcggcaagccgttgccgtttatccccaagggcttgtctaccgacccacgtttgttccgcgccagcgaagtgttgctgcaaagcctggattgcccgatcgaccctttgcaggaacaggacgccatgttcgacctggcgcaggcactgagcaccacgtcaggagagatcatcagccgcaaatccttcgattatgtggccgccgagcgcgcacgggagtttatccacagcgccttgggccgcagcattaccctggatgaaatcgccgaccactgcggccgtgatcgctgggcgttgtcgcgggattttcgtttgttgttcggcaccagcccttaccgttatctgaccatgcggcgcctggacctggtgcgcagcttgctggcccagggccaatcgctggtagacgcggcgatgaccgcaggcttcaccgaccaaagccacatgacccgacagtttcgcagcacctacggcatgccaccgtcgcgctgggtgaaaatgtcaggtcgcttccagcacgggtaaggcttacagctgacgcccaacgattggctcgccgatggtcaggaaattcccgcccgcgatatggtgcaaggtgcgtagctcatcatggccttcgaagtgccagtgcccttcgctgaacacgcgctcgtcggcataggccgcaaccacctcaccgaggaataaatcataggtctgctggttgtgaggctcgggcagcaggcggcattcaagccacgccacacacccttccagcagcggcgcttcggtgtgctcgccggtgaaggtttgcaaggcataggcggcgaatttatcggtctcggaaccggtggtgttgccaaccgtttgcaccaagtcagcctgggccacgcacggcacttggagcacaaaggtgccggcgccttccagcagttggcgggtccaggtggccttgtccagcaccaccgcgactttgggcggttcgaaatccagcggcatggcccaggcggcagccatgatattgcgctggccattgtgcgccgcgctcaccaatacggtcggcccgtgattgagcaaacggtaggccttggacaacggaacggggcgacggtggttagggctcatggagggtcggctcttcaagcaggaaagcgcctacgatacctgagccctgcactcagctcgacagctgattggcgaattggccgactgcgctgaccactttttgcgcaccgtcctggatctccacaatcacagcgcccgcctcggccgccaacgccaggccttgttcggcttgcaggcggccatcggtcatcagcgtcaccgcatcgcgggccatgtcctggttctggcgcaccacgccgacgatttcctcggtggccttgctggtgcgcgaggccaattggcgaacctcatcggcgaccactgcaaaaccgcgcccttgctcaccggcacgcgccgcttcgatggccgcattgagcgccagcaggttggtctgctcggcgatgccgctgatggtcttgacgatggtgccgatcacttgggactgttcgttcaacgcctcgataccttcgccggcctgctgcatgtgcttggccagatcacgcatcacatcgaccgcctgggtcaccacggtagtgccacgctgggcgctgctgtcggtttgcagcgaagtgctgtaagcgatgttggcggcttcggccacggcctgttcctggttgacctgatcagtgatcaccgtggcgaacttgaccactttgtacaatcggtctgctgcatccatcaccgggttataggtcgcctccagccacaccacgcgaccatggctgtcgacccgtttgaagcgtgccgccacaaattcaccagcgttcaagcgcttccagaactgttggtattcggcgctgttgtactcttgcggatcgcagaacatgcggtgatgtttgccctggatctgcgcgaggctgtagcccatgccgccaaggaaacgatcattcgcggtgagcacatgcccgccgaggtcgaattcgatgaccgccgtggaacgcaccagcgcggtgatcaggttttcatgttcgcgcgatgcttcgatggtgcgggtgaggtcgcttgcataaatcgaaaaacgcttgatacgcccatccgaactgcgcaccggctgcacgattgaacgcaaccacgcttcgttgccattgccgcgcatcaagcgcacggtaccggcgaaatgctcaccgcgcaccaacgcgttcttgaagcgttgctggaactcatcctgacgcaggtgagacggcaccagctcatcaatagggcgccccacaatgtgtgtggcctggtaaaccaattcctgcaagaagttggcattggcccactccacccggccatcggcgtccagcgtcaggcacagcatttcgctttccaggctctccttgacctgctgcaagctggacaactcttcgcgaagagccgacagctcctgcttcaaacgggtgttgaacatggggcaccgatggtcataaagggagatggatctgacctgcatcggcgctgccggcgttttctgaagagcactttagggctgcgcccaactctttttttggatccattagccaccgttgttacggcacacgcccatcacctgatactgaagggtattgagcttgccggtggagtcctcataggtcatgcgcgacggcaccgcttcgcacgagcggatcggcggcgtgacgttgaccaccttggcgatgtccagcttcatgccatagcggtacgcctgtacttcgggggccggtttgccctttttctcggcataagccgccatggctttctcattgcgctccatcatctgggcaaaggtgcgatccccgccgccttcggccaaagcaccgaaagacaacgccacaacgaatacgcccacagccattttgtaaaagttcatatcaagttcctcggttgaaaagttcagtgccgagactaacgaacgaaccctgacgcaatgttcactaaaacattacttatctgttagatgcctgtgagcttccagaattgtaatgtttgagccacttcattgttattcgccgtttgcaactatcagcccgggccagatcaataaaaacgcccacttccataagaagctgaaaactgccacgaccaaggagcgaaacatgaatgtccgtcactacacccttccctttagcctcatcgccgcactgcccatggcagccattgccgccgacgaaaagcctgaaggctttgtcgaaggcagcagcgttaacgtgctggcgcgcaatttttacttcaaccgagatgatcgcaagggccagtccagccctaccggcaatggttattccgaagcctgggcgcagggcttgatcggcaagttcgaatccggctttaccagcggcacagtggggtttggcctggacgcctttgccatgtacggcctgaaactcgactcgggcaccggccgcagtggcggcaaaggctcattcggcgtactcccggtggacaacgacgaccatcctgaaagcggctacagcaaattcggcggtgcggcaaaactgcgcgtgttcgacaccgtgatcaaagcgggcgatgtatttcccgccacgcccgtggtggccgcaggtgattcacgcctgctgcccgaaacctttcgcggcgtgaccgtacaaaacatcagccttgagggcctgagcctgcagggcgggcgcctgagcggcatgagccagcccactgaaagcggcatgaacaaaggttttgtcaccttctatgccggcaaggtcgattcgccctggatcggctatttcggcggcgactaccagctgaacaaacacctcagcgtcagcctctacagcagccgcttgaaagacgcctgggaccagtactacttcggcagcgccgccagttacccactcaacgatgacgtctcgctgtttggcgatttcaactattacaaagccgtggatgaaggcaaaaagctgctgggggaattcgacaacaatatctggagtgcgcgggtcggggtaaaggtcggcgctcacagcgtggccctgtcgcaccagcgtaacaacggcgatgacgacttcgactacctgcgccaatcggattcgattttcctcaacaactcgatccagtacagcgacttcaactcgcccaaggagcgctcatggatggtgcgctacgacctggacatgcagaccttcggcattcccggcctgtcgttcatgacccggtacggcaaaggcagcggcgccgactacagcaacgccaactcggtttacatgcgccgcgacgccgccggtaacccgctgaccgatcagcgccgttgggagcgggatatcgaggccaaatacgtcgtacagagcggcagcctgaaagatttgtctctgcgcttgcgccaggcaacggtacgctccagtgcttttgaatcggacttggaggaagttcgcttgattgccgaatatccactggtagcactgtgagtgattacattcgttcgccgttaactaacatctgttcacaaatagccagttatcaaaactgtaacattgggctcagcttctcgttaagttgaacttcctatactcgcgtcaacttatctgcaccgagcaacattcatctctgaagctgtttttgtagctcctttggaaagagatgaatttttaacgccccactggggcgttttttttgggcgctcgccgggcagcgaccgatggtcgcagttgaccctgaagtaacttcacggttcagaattttcctactcacaaaggacatcattccatagggaaatggacccccttctcctatctgtaaaggtaaatccccatgcgtatccttgtggttgaggacgagcaaaaaaccgccgactacctgcagcaaggcctgagcgaaagtggctacgtggtcgattgcgcctccaatggtatcgatggcctgcacttggccgggcaacacgcgtacgaactggtgattctcgacgtcaacctgccgggcaaggatggctgggaagtgcttgagcaattgcgccgcaatggtacccagcgggtaatgatgctcaccgcccgcgggcgcttggccgacaagatcaagggcctggacatgggcgccgacgattacctggtcaagcctttcgagtttcccgagttgctggcgcgtgtgcgcaccctgttgcggcgcagcgaacatatcccgcagccggaagtgtttcgtatatcggaccttgaactcgacccccgccgccatcgcgcctatcgcggcaaccggcgcatagacctgacgaccaaggaatttgccctgctgcaggtgctgatgcgtcagtccggtgaagtgctgacacgcacgcagatcatttccctggtatgggacatgaacttcgactgcgacaccaacgtggtggaggtctccatcagccgcctgcgtgccaaggtggatgaccagagcgaggtcaagctgatccacacgattcgcggtgtgggttatgtgttggaggcccggcaatgaagaccagcagtttgtcgatgcgcctgggcctgacggtcagcctgatgggcgccgggctggtgctgttgctggcaaccctggcttaccttgccctcacccacgaactggaaaaactggcgcgaaaaaacctggaaagcaagatggagcaaatccagcacagcctggcattggggctggacgccaaccgtattcgcgcccgaccgcactcgttgatggacctggtgatcggccatgacaatttcttcctgaccatcatcggcaccgcccccgataacaccgtgctgctgagcgttggcgccaagtctcaggagccgctgctgacagactttacgccccgggaaaccctcggttacctcaactggaccgacagcttcggcaaccagatcctcagcgcctccagcctgatgcgcctgggcaacggcgatcgtgtacgcgttttgctatcgctggaccgcatggacgaccaggcactgctcagtgcctacctgcgcgccacgatcatcgcccttccaatgttgctgctcctcatcggcatgggcgcctggtggctggtgcaacgcgggctcgcaccattgaaacagttcagccatgtcacggccaaagtgaccacccaggacctgacccatcgtttgtcggtcgacaacctgcccagggagctgggcgagttggcccaaggcttcaacgtgatgctcaatcgcctcgacgcgggggtgcagcagttgtcgcaattctctgacgacctcgctcacgagttgcgcgcgcccctgaccaacctgatgggcaaggcccaggtgacactgtcacgccagcggccgccggaagaatacaaagccgtgctggaatccaacacggaggagctggagcgccttgggcgcatcgtttccgacatgctgtttctggctcaggtcagccacccggcggcacgtgcgtcttttacagcggtttccctggcggatgaagcccatcgcgtgatggaactgtttgccctgagtgccgaagacaaacaactcaccctgaccttgagcggtgatgcccaagtgaaaggcgatcgcctgatgattcaacgcgcgctctccaatttgctgtccaatgccatccgccataccccggctggctcacatgtatcactgctggtggagacgtatggcagccatgtgtcggtatccgtcagcaacccggggcccggcatagaagagcaacatttgccgcacctgttcgaacgcttctaccgtgtcgacagcagtcgcgcccgcaccgagggtggcaccggcctgggcctggccatcgtgcgttcgatcatgaccctgcaccaggggcaggctgaggtgcgcagcctgcccggcggtttcaccttattccgcctggtgttccctctgataccgccgagtgaagaaacacaaacttgaacccaacacagaccaatgtgggcgccgtcgagccccagcgaggccgcgaaggcggcggcatggccaacagaaatgtcgcctggcccaccgctttcgtcgcctcgctaaagctcgacaactcccacagtcaatccatgatgctgtcagcattgtcgccaccaacagaatcactcttccttgcggtgtgcccactgatacaacgccggcaataccagcaaggtcagcaacgtagaagaaataatcccgccgatcaccaccgtcgccaacgggcgctgcacttcagcgccggtgccggtggccagggccatcgggataaacccgagggaggccaccagtgccgtcatcaacaccgggcgcaagcgggtcagggccccctcgttgaccgccaccgacagcgagcgcccttcctcacgcaggttgcggatgaacgcgatcatcaccagcccgttcagcaccgccacacccgacagcgcaataaagcccacccctgccgagatcgacagtggtatgtcccgcagccacagcgccatgattccgccggtcagcgcgaacggaataccggtgaataccagcaagccgtccttgaggttgttgaacatcatgaacaacagcccgaataccagcagcagagccaccggcaccacgatgcgcaaacggtccgaggcttccttcaactgttcgaactgaccgccccacgtggtccagtaaccggccggcactttcacctcagaggtgatcgcagcttcagcctcctccacgaacgagcctatatcccggccccgtacgttggcactgacgatcaccaggcgcttgccgttctcgcggctgatctggttcgggccaagtaccagatccaggctggcaacctgtgataacgcgataaagcccaactgcccggaggtgttgctggcggcggccggcaccggaatcaacaaccgcgagagcccgtcgatatccgtgcgcaacgcgtcggacaaacgcaccaccatgtcaaaacggcggtcaccttcgtacaacgttccggcctgacgcccacccaccgcgacagcaatggtgtcctgcacatcccccacattcaggccaaagcgcgcggccttgtcacggtcgatattgatggtcagcaccggcagccccgaggtttgctccactttcacttccgaagcaccgttgagcttttgcaaggtctcggcgatttctccggctgtcttgttcagcaccgccatgtcatcaccgaacaccttcaccgccacgtcgctgcgcaccccggaaatcagctcgttgaaacgcaactggatcggctgcgacagttcatacgcactgcccggcacaatcgcactggcgcgctggatatcggcgatcagcgtttcgcggggcttcttcgggtctggccattggtccttcggtttcaacatcacatagctgtcggaaatgttcggcggcatcgggtctgaggcaatttccgccgtaccggtgcgcgcaaacacccgctcgatttccggcacctgggccatcaaggttttttccagctgctgctgcatctgtaccgactgcgtgaggctcgtacccggcacgcgcaatgcctgctgggcaaagtcgccctcactcaggctagggatgaattcactgcccatgcggctggcgaccgcccccgaggccacgatggtcagcaccgccaaaccaaacaccagcacacgacgccccatcacccaaaccagcaccggcgcataggcccgccgcgcggtgcgcatcaccaggttttcttcctccttgaccttgccggtgacaaacaaagcaatcgccgcaggcacgaacgtcaccgacaaaatcatcgcccccaacaaggcaatcaccaccgtgaacgccatcgggtggaacatcttcccggcgacccccgtgagggcgaagatcggcaggtacaccaccatgatgatcaactgcccgaaaatcagcgcgcgccgggcttccttggcggcggcgaacacctcatgcaggcgctcgctgcgggtcaacaaccgcccatggcgatgctgcgcatgggccagccggcgaatggcgttttcgacaatcaccaccgcaccgtcgacgatgatgccgaagtccagcgcccccaggctcatcaggttggcgctgactttgttggtgaacatgccggtaaaggtgaacaacatcgccagcggaatcaccatcgccgtgatcaatgccgcgcggatattccccaggaacaggaacagcaccgcaaccaccagcagcgcgccttcgaaaaggtttttcttgacggtggcgatggctttttcgacgaggttggtacggtcgtaaaccgtaatggccaccacgccttcgggcagcgaacggttgatttcctcaagctttttcgccacggcctgggacacggtgcggctgttttcgccgatcagcatgaacacggtgccgagcaccacttcccggccattttcggtggcagcgccggtgcgcagctcccggccgatttcgacctgcgccacattgcgcactcgaatcggtgtgccatcggaggtggtgatcacgatgttggcaatgtcatcaatcgatgccacctggcctggcgcgcggatcaacaactgctcgccactgcgctcgatataccccgcgccgacgttggcgttgttacgttccagcgccgtgaccaaatcccccagcgtcaggttataggccgccaggcgcttggggtccggagcaatctggtattccttggcgaagccaccaatggtgttgatctcggccacgcccggcacattgcgcagttgcggcttgatgatccagtcctggatcacgcgcaaatccgtcggtgtgtaggccgtgccgtcatccttcagtgcgccgtccttggcttccaccgtccacaggaaaatttccccaagcccggtggaaatcggccccatcgccgtttcgatgcccacgggtaattgctcacgcgcgttttgcaggcgctcgttgaccaattggcgggcgaagaacaggtcggtgccgtccttgaagatcaccgtgacctgggacaaaccggagcgcgacaacgagcgcgtctgctgcaaacccggcagcccggccatcgcggtttcgatggggaaggtaatgcgttgctcggtttccagcggcgaaaacccggccgccgccgagttgatctggacctgcacattggtgatgtcgggcaccgcgtcgatgggcaatttctgatagctggcgatgccgacaccggccatcaacagcaccgccagcagcacgataatgcgctgctcgatggcaaattggataaggcgctcaaacatgggaaatcactcgcaggatcaatgggcgtgttcggccgagcctttgcccagttcggacttgaggatgaagctgccgacggtggccacctgcgcgccggcgtcgagcccctgacgcacttcgacgtagccgttttcgctcacgcctagctcaaggtggcgggtcatgaacccctccggggtgcgtacgaacaccgagggtttttcctcaacggtctggatcgcggtctgcggcacagtgaccttggcctgataggtgtcggtggcgacttgcaccgtcacaaacaggccggggcgccaggcgtcatcggggttggctacgctcacacggacggtggcggtgcgcgtctgttcgccgagcaaactgccgacgtaggccacagtgccctgcacgtcggtgcccatttccgtggagctgactttcaccggtttgcccacacgaaccgtgttcaagtcttttgggaaaacgccgaaggtgacccacacctgggacaggtccgagagggtaaaggcgttagtggtttcgctgaccacctcgccaacgccgaggtgtttttccacgacggtgccggagaacggcgcgcgcaactcatagcggttgccaccgaccgccacggccgtgccactcaaggcggtcatcttctggcgagcgttgttcagcgcgatttcagcttcttgcaacgtctggcgcgccagcaggtaatcctgctcggcggagatttcgtccttccacaactgacgctcgcgctcaaaggtcgtacgtgccagctcgacccgacgcacgctggcagccagttcgctgcgctggtcggagatctgctggctggcgatcaccgccagcacgtcgccttttttcaccgtctgcccgagattgaccttcaccgactccaccacgcccgccacacgcggcaggaggtgcgaggtgcggtcttcgtcgaaacgcacttcaccgggcaacgtcagcagcgtactgatcgcgcgaggttcagccttggccagttgaatcccggcggcctggatctgctgttcggtgagttcaagcacgccctcgtcttcatcggcctgtacaaaaccggacagcatcaggcccagggcgacggccagcgccatgccacgtttgttgttcatagaaaactcctggaaaaatcaaaaccgggcgaggtcgccgtaaatccgctcgatgcgcacccaggcgtcggtggcctgtgcagtcgcggcgaggtattgggtacgcgccgcgatcagggtgcgctgggcatcgagcacatcaagaaagttgaacttgcccatctcgaaaccacgggtggcgctgtccaccgcgctttgcgcggcgggcaggatttgctggttgaaggcttgcacctcggtgttcgcggcttgccacaaatccagggcctggcgggtttcggtacgcaggcgcagttcggtggcgttgcgcaggtcgcgggcctgatcggcacggcggctggcggcaaggacgttgccctggttgcggttgaacaacgggatcggcatcgacacgcccaccaggttcacccgttcgcgcacgctggcgtcgtactggctgccgatggacacgtcgaggtcgggaatacgctgggccttttccaggcccacactggcttcactttgctggatctgcagctcggccagacgcaggtcggcggtctgctcaaggcgtgccagcaactgcgcggtggccggcaagggcggcgtcgattggctttgcaccgccacggattgaaagtcgggcgccgcgctgccggtgctcgcagccaggctgcggtaggcgtcagctaggccaatttgcgcgcggttgaactccaggcgaatttccgacacttgcacctgcgcgcgagtcgcttccacaggcgaagccttgccggcggtgacgcgccccttggcgaccaccagcccgcgctcggccaatgccagggagcgttgcgccagctccaggcgctgctgggcacgaagggcaccgtaataaccgtcgatcacttcggctcgaagagcgttccggcgctgctccagggtcagcgcggcagcatcctgggcacgctcggccacctcgatccgcgcgccgcgcttgccgcccagttccagggcctggctgagcttgatgctggtggtgcgggtgtcgcggcgagtgtcctcgacatccagcgaggccaccgggttggggatcaacccggcctgttgccgcccgcctttggcgatgtcgatctcccattgcgcggccgccaggtccgggttgttggcgaaggcggctcgcagggctgaatcgagggtaagggtttgtgcctgggcgacgcttgcgactgcccacaatgccgtcgcccccaacagtgttctaacggaaaatgccataacgagagttccacgcccatgaagtcgctgaggtttcccagcgggggcaatgtagctttcggtacttatcgcagcggtggagggaagattacaaatccgtcaggcatgcagctcgtcgtggtcgtcgtgttgaaagccttcaccctcgacctgaagtgtcgcgtgggaaatatcgaattgttcgtgaagcaattccgtcacccgcgtgaggatttggggttcggtgccttgggacgagtccgcgaccagatgcgcactcagcacattcttgccgctggtcagggcccagatgtgcaagtcgtgcacgtccttgaccccaggcacaccgcgtatcgcctgctcgacctgatcgatatcaaccccgtccggcacgccttgcagcaatacgttcatgctttccttgagcagcgtccaggtacgtggcagcacccaaaaaccaatggcggctgccaccacagaatcgacccaaccccaaccggtgaacatgatcaccaccgccgcgatgatcacgccgatggaaccgagcatgtcgctccagacttccagataggcgcccttcacgttcaggctctcgccactggcagcactgagcaggcgcatggaaatcaggttgacgatcagccccagcacggcaatcaccagcatgccggtggactggatctcggcgggggcctgcaaccgctgccaagcctcgtacaaaatgtaaaacgccacggcaaacagcagcagcgcattgaaggccgccgccagaatctcgaaccgcgcgtaaccaaacgtgcgcttgcggtcggccgggcgtttggcgacctgaatggccaccagagaaatcgccagcgccagggcgtcggtcatcatgtgcgcggcgtccgacagcagcgccaggctgccggtgacgaaggcgccgatgacttcggcaatcatgaaactgccggtcaatcccaacgccatccataacttgcgttcgtggccggcgcgtacttgggcgtggctgtgtcctgcgctcatgaaaaatcctcgaggtgtggggtgcgtggatcatagagctataggtcaaattcccgtgcatgggttgcagatttgtcatccgcccgccagcgcgctgttaaattgatcgcaccaaaatcgcacaagagcgcgctggaacggttctatcaggtatgcttttcaggcaggaaacaaaaagaaacaaattagccaacctgttcgataaggagtcccgttttggagttatcgactgccgcgtggatggttcacgacacccgcctcatgttttgcgtattgctggccatcgccagcatcattgtgctgatcagcgcgaccaagctgccgccgttcctgtcgatcctgatcggtacgtttatcgccggcgtgggcgctggcctgccaccggaagaagtcgccaaggccttcagcaaaggcgccggggcgatcctcggcgaggccgggatcatcattgcgctgggctcgatgctcggcgcgctgatggctgaatccggcgcggccgaccgcatcgccaccaccctgctcgggttgggcaagggcaagtcattgccgtgggtgatggcgctggtggcgatggtgattggtttgccgctgttcttcgaagtgggcctggtgatgatggtgccgatcatcttcgtcatggccaaacgttcgaaccagccactgctgaaaatcgccatcccggcgctcgcgggcatgaccaccctgcacgccctgatgcctccgcacccggggccgctgattgcggtcagcgcattgcatgccgatttgggcctgaccatgttgctgggtttctgcctggcggtgccggcggtgattctcgcgggcccgatctacggcaactggctgtccaagcgcctgcacgtggatgaaccggccgacatcggcgcgctgttcagcgcgccgcccaaggcaccgcgccagccgagcttcggcatctcattgctgatcattttgctgccggtgattttgatgctcggcagcaccttggccaaggtcgccatgtcaccggaaaacccgctggcactgaccttgaaattcctcggcgaaccgctgatcgccctcggcctggccgtgatcgccgccgtggtctgcctgggctgggccgccggcatgccgcgtgcggaagtcggcaacaccctgcgtaaagccctcgcgccgatcgccgtgctgctgctgaccatcggcgccggtggcggcctcaagcaaacgttgctggatgccggcgtcagccaaaccatcagcaaggtcgccgaaggcgcgcacatgccgtatctgctgctggcctggctgatcgccgtggcgctgcgccaggcgaccggctcagccaccgtcgccacgaccaccacggcgggcattctcgcgccgatgatggccgggctggcggcaacgcaaagctcgttggtggccctggcgattggtgcaggctcggtgttcttctgccacgtcaacgacgccgggttctggatggtgcgtgagtactttggcctgcagttgaagcagacgatctgggtgtggtcggtgttgcagaccatcgtttcagtcgtcggtttgatcggtacgttgctgctctggcatttcttgacgtaaccctcaagcagccaaggtgtggcgcttgccaaacagcgccacactcgccacccccaccgcccccattaccacgcaatagcccacgcaaatccacgggctggtcggcatcaacgcgatcaacaacagcggcgtggtactcgcccacaatgcgtaggcaatattgtaggtgaaggaaatacccgacacccgcacctgcgccgggaacagcccgaccatcaccgacggcaccgcgccgaccaccccgcaactcaagcccgccaccgcatacgccgcgcccagccacacgccgccgctgatcaagcttgcgtacagaaccgcaatgcccactggcagcaacaggctatagaccagcaccgcgcgccaggcgccgatgcggtccaccagcaggccggccagtacacaaccgatgttcaggaaaacgatgcccagcgcactcaatgcgaaggtatggctgggggtcatgccgaaggttttttgcatcatggtcggcgtgataaccaccagcaccacgacggcggaggtgagcacgcaggtgaggatcatcgccggcaacagcacggcgcgatggtcgcgcaatacggttcgcaagggcatctcggcagcggcttgacggcgagcctgcatttccaggaacaccggggtttcgctgagccagcgacgcagccacacaccaatcacgccgaatacaccgccgagcagaaaaggaaaacgccaggcgtagtcgaggatttcagccggggtgaagacttgcgccagcaaggttgcgatgagtgcgccgagcaggtaaccgaaggtcaggccggcttgcaggaaacccagggcgtaaccgcgatggtttttcggtgcgtgttcggcgacgaaggtccaggcgctgggcacttcaccgcccaccgccgcgccttgcagcacgcgcagcaccagcaggatcagcggggcgaaataaccgatttgcgcgtaggtcggcatgatcccgatcagcaggcagggcaaggccatcatcaggatgctcaggctgaacacgcgtttgcgccccaggtgatcggcgaagtgcgccatcaggatgccgcccaacgggcgcgccaggtaaccggtgacgaagatgccaaaactttgcaacaggcgcagccattcgggcatttccggcgggaagaacagttggctcaaggtcagcgcgaagaagacgaagatgatgaaatcgtagatttccagtgcaccgcccaaggcggccaggcccagggttttgtagtcggagcgggaaaaacgctgcgcctgtggggaaaaggtggcagtcatgggatggctcggcagacaaacaaaatggcgtgcaggttatgagctgagccagatgatggcaatcacggcagatatatttgttttcctcatggatcgatgaagataactgcattcccatatcaatggccgtagcggaacatgccggaaaactgccaaccccctaataaatacaagaggtagaacctgtggccgatgcaatcgaagaaagccgctatgcccgatttgccctgcgctgttccaacttcgccgagcgatggtttcccgactcctgggtgtttgccgccctcgccgtgatcatcgtcgccgtggcgaccctgggcatgggcgccgcgccgtctgaagccgccaaggcgttcggcgacggcttctggagcctgatcccgttcaccatgcagatggccttcgtggtgatcggtggttacgtggtggccagctcgccgcctgcggtgaaactgattgatcgtttggcgcgcatcccgaaaaacggccgctcggcggtggcctgggtggcgttgatttccatggttgcctccttgctcaactggggtttgtccctggtattcggcggtttgctggtgcgcgcactggcccgtcgtacggatttgcgcatggactaccgcgcggccggggctgcggcttacctggggcttggcgcggtgtgggcgctggggctgtcgtcgtcggccgcgcaattgcaggccaaccccgccagtctgccgccgtcgattctgtcgatcaccgggatgatcccgttcaccgagaccatctttttgtggcaatccggcgtgctgttgctggcgctgatcgtggtgtcgctgatcatcgcttacgccaccgcgccgggcccgaacagcgcgcgtgatgccaaggcctgcggcgtcgacccggccttcaacctgcccaaggttcaagcgccgacccgcccgggcgagtggctggaacacagcccgttgctgaccattttgctcgcgctgctggccgccggctggctgttccatgagttctcgaccaagccggcgatcagcgcgatttcggggctgaacacctacaacttcctgttcatcatggtcggcgccctgctgcactggcgcccgcgtagcttcctcgatgccgtggcccgcgcggtgccgaccaccaccggcgtgctgatccagttcccgctgtacggctcaatcgccgcgttgatgacggtggtcaagggcggcgacggtcagaccctggcgcaccacatctcgttgttcttcacctccatcgcctctcacgacacctacgcgctgttgatgggggtgtactcggcggtgctcggcttctttattccgtcgggcggcggcaagtggatcatcgaagcaccctatgtgatgcaagtggccaatgacctgcaataccacttgggctgggcggtacagatctacaacgcggccgaggcgctgccgaacctgatcaacccgttctatatgctgccgttgctgggcgtgttggggttaaaggcgcgggatttgatcgggttttcgttcgtgcagttgttggtgcacacgccgctggtgctgtttctgctgtgggcgttggggacgacgttgaagtatttgccgccggtgatgccgtaatcaacggctgaaagcagatgcgttcaggctggagagccaggaaggcgctccagcaaatcaggcaatgcgctttggatggtttcccagactacgtcaaggttgatatcaaagtaaccatgggcgatccggttgcgcatgccacgcatgcttcgccaagggatttgcgcatgaccggcagcgaagtccggaaactgatccatgatcttggtggatgcctcgccgatgatgatcaaactcatcaccaccgcttgctgggtgcgcctgtcttccagaaatgcttctttgctcaagccctcaacaaagcagatcgcgtcagtgctggcttgcctgatgtgttccagataatcgccaaggcggctgaatgtcatactggccgcgcctctgccaacactgccgcacgaaactttacaggcaaatcggccggagtcagcaagtccacactgacgccgagcaaatcctcaagctccacctgaaggccacccagatcaaacagcgtggttcccggcggagcatcgaccaagagatccaggtcactgccttcctgatccgtacccgccagaacagacccgaacactcttggatttgaaatacgaaaacggcctacgacttctctgacggcagctctttgcagatcaagggcggttgaaggtttcacggctcacctcggtgacatccagtatcgggtgagtctagcagcgccgggggtagcccgacacgtccgcgatgatcacgccactgtcttatttgcgtcacattccattgctaccgtcctgcgaaatatcttgaaacaaccaccccgcagggactcacagcatgagtgatgagcacgaagaccgcccttccgccgattccgcagcccaggcgccggtagacaccagccgccgacgcttcctggggggcgcggcagtgctgggggtcggcgcgacgctgagtgcttgcggcaacaccagtgaagcgccgggcaaacccgtgacgcggccactcacacctcaggaactcgacaaggcgctgcacgaccaggtgaaaaccgtggtggtgatctatgccgagaaccgaagtttcaacaacttgtttgctgacttcccaggtgtagagaaaccgctgtcggcactcgctgcggctgacgtccagcaacgcgaccgcgatggcagcgtgctgaccaccctgccccccgcgtggggcggcgtactgcaagtcggcccgcaaagcgtggacggggtgacgtaccccagcgaagtgcaataccaggaaaacctgcccaacgcgccgttcgccctcaagggcccgaacgccgaagacctaccgctgagcctggtcacccgtgatttgtggcacgtgttctaccagaaccagatgcaaatcaacggtggcaagaacgacaacttcgtggcctgggcggattccggcggcctggtgatgggctattacgctcagagccgttacgccctgcgcctgtgggacgtggccaaggagtttgtactctgcgacaacttcttccagggcgcctttggcggttcgttcctcaaccaccagtacctgatcagcgccacggcaccgttttatccgaatgccgcgcaatcggtggccaaggcacagatcgcctcgctgcaaagcgatgacccgaccgacccgcgcctcaagccgctggacaaatccccggccagcgccatgaccggcccgccgcagttcggccccagtgccctgaccccggacggctacggcgtcaataccctcgctccgccttactggccgacctggattcgcgacccggaaaacccggattactccaagcccgacctgcctaacgtgctggtgccgcaaacccacgaacacattggcgacaagctgtcgaaaaagaacatcgattgggcctggtacgccggtgcgtggcaggcgacgctggaccagttcaaggactcgggcggtattccgaagattccaaacttccagtaccaccatcagccgttcaactatttcaagcaacaagggccgcaaaaccgcgccgagcgggacaagcgcctgcgtgacggcggcttgggcgacgagtcgagcaccaacaaattttttgccgatgcccaggccggcaagctgcctgccgtcaccttctacaagccccagggcaacctcaacatgcacgccggttacgccgacgtggcctcgggcgaccgccatatcgcccgcgccttgaaggtgttgcaggaaagcccgcagtggaaaaacatggtggtggtggtcactgtcgatgaaaacggcggctggtgggaccacgtcgcaccgcccaaaggcgaccgctggggcccgggcacacggattccggcgctggtggtctcgccgtttgcgcgtaaaggcacggtggaccatacggtttacgacaccgcatccatcctgcgcatgatcacacgggtgttccagctggagacgctggacggcctcaagcagcgcgatgacgcaatgatcgcccgcggccagaagccgatgggcgacttgagcaatgcattgcagttcaacctgtaggttttcttatccaatagcgacatgctcggcgatttagcacgcggttttcctggtcaaccgctactgtgtgcaagtgggccttcatcccgcgcagacgggcttttgctgacaaggaatcaagcatgttcaaaccgaccaggttgtcttttaccctggccgcactgctggccagtgcggtcgtacaagccgacgtcgaagtgccactgggcagcacgcaacgtgtcacccagttgttcgcgtttcccaacaattgcaacgtgatctgctttcggccctggacgctggaacagaccgccgagcattacttgaaccagagcctgcagcgtgacggctacagccgcgccaaggtcagcgtaaaagcccacgacggtcagctgtcggcgacgtttaccggcgtgccggacggctacggccagcccctgaccacgttgctcaatactgctgacctcgcctaccagggcgccagcaagctcaacagcgacggcaaatgggcttacaactggtacctgttcctgccgctgggtatggcgctggaaaaccgcaaaagcatcgaattgctgcatttcccgccggattactctctgacccaggcccaggattacctggaatcggccaccacagaccgttgggccaccctgctcaccgacaacggcattcccgccaccgaaaccccggcctaccagaccatcatcgacatcgcaccgattgccgcgccgtccaacgcgggcaaggacctggagaccgtctacagctacttcaccgactaccagacacgcatggtcaaggagttgagcctgcacgccagtggctcattgccgatggtggcgttcggcgcgccggtgcgcagctggatcaagcaacagtatggccaaacggtgaacgtgttgagcctggcgcaaatcagcccggcgccgggtaaaaccgtgtcggtgctgggcgccaaccacccgagttacatctggtatgccgcggatccggccacctacgacggtaacgagcagaaggccgacgaagccggcttgaaagtaatgggccaggatttgagcgcagcctgctggcaagccgggatgggacagaagccggccagcgacccgaatgtgctgctcaaggcctgcatgaacacctggcaagtcacgcgcaaagaacaaacctgtgagctgttctatacctctgtgcgcaacctgaccccagaccaggccaacgcaaaatgcgccacgcccaccaccaaggcgcaactcaagcaattgaaggacgccgccccggcacccgcgctcaccgcgccagcactgtaaagtgcacataaaaaaaccgatggctactgtcaataatgacagtagccatcggttccatgttcagcgagtcttgagccgcgcccattcgctgcaagcctggtaatcaaacaacattcgcaggtcgatgcagcccaaccagggagagttatgaaaactcaagccatggataaggctaatcgggctggtgctgactgcatctacccatttgctacaacatcgccagatcgctacccgtcaacccgtcattttcaagtggtacacgatcaaaacggacgagcaacaggcattcaatcccgcatacggttcgacagcagaacccgtatcgccaacgtgtccggctatgccacccgagagcgccgcccgaacacgtttcagatctcttcacacatttatctgtttgactgctggttttgcgggctgctcaaccactcgtgcgatcccaatgtactgctggacaccgacttcctggaattgtggtcgctgtaccctatcctggccggggcactactgaccatcgaccacgccgtcacagcggacatcctgccttaccaatttgcctgcaactgcggcaagccccgttgccgaggctggatcaagggccgccaggaacagataaacgcagagggcctgcgctttctggagcagtggcacaaccgtgttggctgttaagcctcgcccaacgggcgcaggcgatattgcggcggcaactgctcgaaaccactgatggtggtgttcaagcttttccagcggccatccttgatgccgtaaatgcacccatggatcgacagactctgcccgcggtgccaggcgttttgcacaatgctggtgtggccgacgttggccacttgctgaattacattcagctcgcacatgcggtctacgcgttcttcttcggtgggcagttgagccagcacgtcacggttttcgtagtagaggtcccgaatggtgcgcagccagccgtcgatcaggccaaactggcggtcctgcatcgaggcgcgcacgccgccgcagccatagtggccagtcacaaggatgtgtttgaccttgagcacgtccaccgcgtactggatcaccgacaggcaattgaggtcggtgtgcagcacaacgttcgctacgttgcggtgcacaaacaggtcacctggcagcatgccgacgatttcgttggccggcacgcgggcatcggagcagccgatccacaggtactccggggtttgctggcgggccagcttggcgaagaattcgggatcttcctgtttgatcgcgtccgcccagcgttcgttgttatcaagcaggtcttgtagttcgttcatcaggaaagcctcaggaatgatgcgcagttttgtgactgacaacccctcgtccgggtcacgctcggcgcgaattagcttgaatctttggagcgccgtgcctgtccacacactataagccccacagtatgaggattggccatgactgaatcacgacgccctttcggcgctacacagcccgaaccgattgatgacaatgaagaccgcatgggttccatgcgcgagctggattttgacgaagaagagcccacggcggaaatcggcgatgaaatccccgcgcgcgagcgcaagcacctgatgcccgacgaacgggtgcgcgaggcggggttgaccggcgcatcgacggatgatcatgagccgaccgacgacgatatgagcccggaaacgctgatccatgaggatggcgcgcgggatgcaagagaggaaggcgaggataatcctgcggattatgatctgagcatcgtcgatgaagacgagattggcggcgggaatgggctggatgaggctgaactggccgatatcgaccctgtagacggaaaccgctgaagctcattgcaaacccgggcccctgtgggagctggcttgcctgcgatagcatcactgcggtccgactaatacaccgaggtgcctgcatcgcgggcaagcccggctcccacaggagccggtgcgaacacgagttttgtgtttaatcgacgagggtgcaggccatcacgacagcatcttcgcggccacccacggcggggtagtaatcccggcgacggccaatctcattgaagccatagcgttcatacaagcggaatgcgccggtattgctgtcacgcacttccaggaaacactcacgcgcactggcggcatatgcgcgggacatcaaatgctccagcaacgccagccccaggccacggccctggttctccggcttgacggtaatgttcagcaaatgcgcttcatcaaggatgatttgcaccacaccatgccccacctgctgctcgccttcgaacatcagccagatctggtacttgcccaacccatcgagaaaaatcccgcgggtccaggggtggctgaacgccgcgtattcgattttcagcacggcgtcgaggtcagcctcggtcatcgggcggaaggttaaagcctcactcatcggttgttttccagcgcgccatcagccggcgcatggcttgccagacatcagccttacgctgtggctcttccattaataattccaggcccggcagggcccacaccgaacccaagccttcgacctgcagctcgcggtaccaggcttcggcattggcctcaccggcaaaccgcacggcgggcaggccgatcagccacaggcacacgcagggttcgtcttccaggcgcgctgacacaaacccttgcacaaaatctcgcgcggcttcggggccctggtccatgttgccgcgcaccagcagcggccagcgcaccggatcaccaatgatttgcgggctgtcaggcaggccggcggcgcgcagcatatccttgagcagcatataggccgggtcgcgggtctggaaacgctcgcccgtgggcagttccaccagcaacaggcagcgcccggcgcgcagcaattgcagggcgaagcgcggcggcggcaccactggggccttgaccaccggggccgcctcttccacggctttggtcgccttggtcaccggcgacgggcgcggcacttcgatcttcgcccgttcggcgaccgggcgtgactgcggggcaggctggatcaccgccaccggcgccgcagcctcctcgcccgacggctcgaacgcctcatagggctcaagcgcctgcaacagctcaggccgcgaaggcgcggcaaacggcagttcggtgcggggcagccagttgaccacctgcatggcggtcaagtaagcgcgacgtcgggactcgataagcacagctcggccacttgtggataactaaagagcggggattctaccgctgttcggtaacaatcgcccactgcgcactgaccggctgtggataaatcccactcccgatgcagtacaatcgcgacttttaatcgccaaccagccggccattccgatgatcgaacccaagcgcgtcttgcgcgccctcgccgaacactgggccctgcttgagccactgtgcgaacacttcgaccaaggcaccttgagccttggcgaattgcgcgcacaattggcggcccaacaactggacagcacgccacaggacattaccagcctgttggacgtgtggattcgcctggatatcctggtgcctgtcgccaagagcccgaaccgtttcgagctcaatgcgcagatccatgacttcctggcctatcttcgcaaggagcaccggcttggcctgtgcctggaaatcgaagcctacctgcgccaccttgagcgcctggcgggttatatccaggacgccttcgacattcgtgatggccacgacctggcccgccaactgcgcttgctggacatgcgcgtgcgggacgtgctgaaaaaactcgccaacgacgaacaggccctcgctgccgtggccgaccgcgccaagaccagcgaccggcagattccgttgcgccagcgttacgccgaagtattggcaacctgggacgaatacgtcgagccgatgatccaactggtaaacgccgacggtgctttcgagcaaggcgtgcgcaaggtggagaacgtgttgctgcgcatgctcaccgagcaacagcgcctcggccacttggtggacgacgatatgctgctgcgcacccatgcgcgcatcctcgaaatgcagaccagcgcccaactgacgttgcgccatgcccgcgaactgctgctgccgctgcgtgaagaagcgcgccgccacaacgccgtgacccgtggcgcggcactggccctgtcggcgatccgccgcaaaggcctggacgcggtgccgcaggctgcgatgccgatgtttacccggccacaaagtaccttcctcggcagtgccagccaggttgaagcttatgtgtacgccctggcgaatttcgaaccgaaaccggcgaagtttccaaaagcgcacaaatcctacaaaggcgacgcccaacgtgcaccgcgcacggtcaaggaaatgctcgagcgctgcgaagatgcactgccgatgccggacctgatgacctggctgctggagcaggaaccggaaggcgccaccgacgaattgctgtactggttctcacgcctgtcccgcgaaaaacgcttcaagcgcgaacgcctggaacgccgcgattaccacacacacgagcaccaggtcagcctgcgctcattcgccctgctcccggccagcagcgatatagccgagaattctgcgagtacccctcatgcatcttgatctatccgaactgtcccagctggcgccgatctttcgcgagctgttcaagggttaccacgtcagccgccgcgacccggagctgtacgcgcaactatcgaacttccaggaccagtaccgcacgctgttcaaggccctgggctttgagctggtgtgtgatacgcgcggtttctattacttcgtgccggattccgccattgccagcgcgcaggtgaacaagaccgcgcaacgcctggcactcttcaccttcatccttgtcgagcatctcgccgaccaggggcgcgacccgattgccgtgctcgacggtggcagcctgggccgcgatgaactgccgtcgctgctggaaaaataccgcgacctgtttatccaggccgaagtgcagacccaggaagaactcgaagaaaagatcatgcgccgcatgacccaactgggttttgccagcgaagataacggcgtgtaccgcttcctgccgccgatgcaccggttcctcgacgtgtgcctctcggtacaacaggaccgcgatctcgcagccagcgtgcacagcgtgttgccactgccggcgccggtgatcatcgacgaagacagcgatgaaaaactgctgaaaaccgatgatccgttggatttgagtgattttgcagaagaaagcgaagaagacgccctggcccgcgccattgccgaagaacaggagaccgatgcatgagcaaggaacgctacggcatccgccgcttcgccctattgaacaccgccggttatagcctgggtttgttcccgctggaagagccgttgtccgtgtatggcgcaaacaacctgggtaagtctgcgtcgatcaacgctttgcagttcccgattctggcgcgcatgtcggacatgagtttcggcaagtacaccctcgagcaatcgcggcgcttctactttgccaccgataccagctacatcctcgtggaagtctccctgccccacggcccgcatgtgatcggcgtggtcggtcgcggcccgggtggcggtttcggtcaccagttctttgcctacgccggcaagctggatttggctcactaccagaagaacgacacctgcctgcgtcagaaagagctgttcaccaaccttgaacgcgaaggcctcaaagcccacgaactcaagccggacgaactgcgccgcttgctggtcggcggccacacgtcgatcccgttggacctgacactgattccgctgcgctctaccagcgagcaaagcctgaagactttccgcgcactgtttatcaacctgctgcacatgcgcgaaatcacggccgccaagctcaagcaattgttcctcgatgcgttcgagcacagcctgcgttccggcagcgtggactacatcgccgcgtgcgaagaagccttccgtgatgtaaggcgcatggaacaggactataactcgctggtggctgccgggccgttggttgaagcgctcgccaatggcgtgcgcttgcgcgatgtattgcgcggcaaattgcatcgtctctcccccttgctggattcgttgctgggcacctggtcggactacgccagtgcgcgcaaggaagagctgaccatccaggccgaacattaccgcaacgagcaggacgcgctgcagaacgatcagcgcggcggcactcaggagctgatgcgcctggagcgtgaaatcagtggtattcagcgttggctgggtgagctgtcggtgctcaagcatcgcttcgcgctggtggatgacgtgaaggtgctggagcagcaactgctggcggccaaagatgcacacgatgagctcgcgggcgccttggcgcagtcgcggcagttcagcgccgaggacctggacgagcgtttgcgcgacctggagaaacgcctgaagtcggtcaagcagcaactcgaccacgcggacaacaacagctacgccaagctgcgcgaagaattctcacagccggatgtcgagcgtctgatgcgactgttcaacagttcgttgttcagcctgccgttgggcgcgcatggcatcacgctggacgaggaaggcttgtgggttaaatccctggagcaaatcctcgacggcttcaagggcgaacgctttgaagtgccggggctgtccatcgacatctcgcacatcgaaccgcctgcattgcaggccttggcggatcgcgcggcgttgcgcgaccagaaagagcgcctggaaaaagaactcaagcagctgaaaacccagcaagccgtggcggctgaccgtgctgcgagcaagacccagaccgaagcgctgtaccagcaggtgctggatgcgcaaaaggctctggaagatttccgccgcgcgcaaaccctgagcgctgaagaaggcgagaaattggaaaacctggcgcagatggaagcggcccaggatgaattgaaacgctccagcgatgcgttcaccgagcgcgtccagcaactgtcggccaagctgcaactggtgggccgccagattggcgatatggaggccaagcagcgcacgctggacgacgcgctgcgccggcgccaattgctgccggcggacttgccgttcggcacaccgttcatggacccggttgacgactccttggacaacctgctgccactgctcaatgactatcaggacagctggcaaggtttgctgcgcgccgatggccagattgaagcgctgtatgcccaggtgcgtctcaagggcgtggccaagttcgacagcgaagatgacgttgagcgccgcctgcaactgttgatcaacgcctatgcgcaccgtaccgacgaagccctgaccttgggcaaggcacgccgtgcggccgttaccgatatcgcgcggactttgcgcaatatccgcagcgactacgacagcctcgagcatcaactggcgctgttcaaccgcgagatcaacaagcgccaggtgtccaacctgcagagcttccgcatcgtgctggcgccgaacaaggaagccctcaaacatatcgaccagatcatccacagtgccggtcagtatgaggaaggtgaaaccctgtcggtgtttgacctgagccagagcgccgagcaggacaacaagaacgaagaggccaaggagtacctggctcgccttgtagccgccaaccataatcagttgggcctcaaggacttgttcgagctggcgttcgaaatcaccaaggtgcacggccagccggtgattcacaccgacatcgacggcgccgcgtccaacggcaccaccatgaccatcaaggcgctgaccaacatgtatttgttgctgcacttgatggaccgcgaccaggccgggcgtgtgcggttgccgtactacctcgatgaggcggcggatatcgatgagaagaaccaggccgcgctgctggaaaccagcttgcagcttggcttcgtgccgattctggcgagtgtgaagccgcaggtgtcggcccaggttgcgatcgatctggaaggcggtagcgggccgaacgggatctatatcgatgaggcggactggaagtacatccgtcgtcatgatgtagtgaaggcaacgctgaatgtgcaggcggatgagccggagctggatgaggtttgatcggctgagctgaaatgcaaaaaggcccctggatgagaatccaggggccttttttgtagcctgttccggcctcatcgcgggcaagcccggctcccacagttgttcgcattccaacaggatatacgcgatcgagtgtgggagccgggcttgcccgcgatggccgcgacgcggttatttgccgagcgggattttaggcgcccaggtcagccattcatcctcaaacttgtcgaacaacgggaacgtttgctgcggccgtgccgcattgcccatccgctcaccatccggcgtagcaaaggcaattcccccggcaaccagtgtctccagagactccgtgcgcaccgtcgcgcccttgaacaggccgaagtcgagaccgaatccgctggtgttccagaaacggctgccgccccgtaccaaggctgcgtacttgggttcgatcaggatgtggatcagcacgcggtcggcggtctggcccagctcgtagccggtgactttgccgacggtgacctcacgataggtaaccggtacgccttctttgagcgagcctcgacgtgcggcgctgagaaccaggctcaagccttcttcctgatgaacagccgatggcggttcgctcaacgcgacgaagctcttttgcggcccgacgtttttcgcggccggttgcacttcgatgtattggccagtgaccagggtttccaggttcgaggttttcatcaggcccagctcaggcttgaccacccagaactggctacccgtgcgcgcgatgcgatcggcgacttgggtaatgcgcgcactgagcaggaccgattgcatgtcggcgctgaggtcgacactttcgatcttgcccacgtccaggcccttgaagcgcaccggtgtgccgggacgcaggccgtcggcgcggtccactttaatggtgacgagggtgccgtgttggttggcggcttcccggtcggtgaagaggcggaaacgcgggatgcgttttttcaacggcacattcggttccggtgtttcgaacgcgataccgccagccatcaggctggccagggattcacttttcacctgaataccgccggtgaggccaccggtcagggtgacgccgctggcgttccagaagcgtgtcgaaccgttgaccaggttctcgtactctttctcgatgtgaacgccgatcactaattgcttgttcttgcgcgagaactggtagctctgcaccgaaccgactttgacctgtttgtagaggattgggctgccgacatccagggagccaaggttgtcggtgaacagcaccatatgcaggcccggggagcgcaggtccagcggtggcgctttggcacgggcgacgaattcgcgttgcggagcgctgcctttgtcacccgggcggatggcgatgtagttacctttgaccaaggcctcgaggccagtaataccggccagggagatggaaggcttgaccacccagaattgggtgtcttgcaccaggtaatcttcggccagcgggtcgagggtcaactctgcgttcgcgctggacaggtccggatcgatcttcagggttttcaggctgccgacctggatacccttgtacatgaccggcgtacgcccggcctgcaaaccttcgaagtcagtgagtttgaccttgaccttgataccggcggcggcggcgtcgaagtcttcatagagacggaaaggcaggctcggatcggtcggcgggctgtccttgcgattctccggcgtagcaaaggcgatgccgccagcgacgatgctggagagggattcgctgcgcaccttcacgccggagaggttggcgtcgatgctgatgccgctggcgttccagaaacgtgtgtgcttgcgcaccagattggcgtaggtcggctcgatatagaccttgatctcgacagtgctctggtcttcggacagcagatagcttttcacctggccgacttgaatctgcttgtagaacactgggctgccacgattcagggaacccaggcgatcggctttgagggtcaggtgcagaccgggcttggcatcggataacggtggttcttcggagagcgccttgaatttacgcgagggctcgccgtcgccagggctggcggcgatgtagttgccggagaccagggtttccaggccggtgatgccggcaaggctgacgctgggcttgaccagccagaagcgcgtgttggttttgaggtactgctcgacgtccttgttcatctcaatggtggcaatcaccccgcgattgttaccctcgtcgtccagggccaaggctttgaccttgcccacgggcatgcctttgtagaccacttcggtcttgttgacctgaatgccctcgccgctttcaaagcgcacctggatctcgatgccttgttgggaataggcacgccaccccaaccagccaccgataatcagggcaatcagaggcaacacccatatggccgaccagttggaggctgggcgggttttagccttaggcaaatcactcatggtcgtcgtccgactccgtgttatcccaaatcagtcggggatcaaaagttactgcggcaagcatcgtcaagatcaccacactggcgaacgctgccgcgccgagattggcctcgacgctggcaagccgcccaaagtttacaaccgccaccaggatggcgatcacgaagatatccagcatggaccagcggccaatgaattcgataaagcggtacatcacaatgcgttgttgcgcggacagcggctggcggcgttgcacagagaacagtagcaggcctatacccaccagcttgaaggtcggcaccaggatgctggcgatgaacacaaccgcggcgataggaatcatgccgtgctgcaccaactggatgacgccggccatgatggtactgggatcgccctggcccagggaattgatcgtcataattggtaacaggttggccgggatatacagaatggccgcagtgatcagcaaagcccaggtacgcgcgaggctgttgggccggcgtgcatgaatcaacgcgccacagcgtgtgcagatttgctcttcggtgtccggctcttgcttgttgagctcatggcattcggtacaaatcagaatgcctgcatcaatcgcccgcatgatcattctccccagacagcgcctgccaaatctggtggggcgacatcaccacctccagcagcacctgaaccattaataaactgatgaaacagatcaggcctaagccgaccgtgatggcagccatgtccgcgagcttaacgatcgccacgagcacacccatcaggtagacctccaacatcccccaatcttttagatggtggtaaatgcggtagagcagcaagccatagctgcggccgactttccagcgaatgctgagcagcacggctaactggcagagcaacttgagcaggggaacgcccatgctgcacaggaacaccacggcagcgacaccttgcatgccagtgtcgaacagaccgacgacgccactccacacggtgtcttccgaggactggccaagtagattgagctgcataatcggtaaaaagttcgccgggacgtacagcaataacgccgctatcaccaaggcgaggcttcgctcaacgacattgtggcgatgggcgtacaactcgtagccgcagcgtgggcattgggctttttcaccgagggcgagtgagggcttgcgcatcagcaagtcgcactcatggcatgccaccagttcgtccagtggtaaatccgacacctcgagggtatcaaccggatcgggcatagatagggctctgactctaaaaaaggttaggtgcctattctagtggtctggttcagaaataactgtgcaaatttgtcggcagacgtcggcgatattttccgaccgcccaaaacaaaacccctgtttgcgttagcaaacaggggttctggaatttaatcttgacgatgacctactctcacatggggaaaccccacactaccatcggcgatgcatcgtttcactactgagttcgggatgggatcaggtggttccaatgctctatggtcgtcaagaaattcgggtactgagtcgtggcttatgccccgcttcagcaaattgggtatgtgacagctttcggtgttttgtgaacgtcgaactttcggttcatctcgtcttcacacaccgcaatctgatgctcgttagagtagtcaaattgcttgggtgttatatggtcaagcctcacgggcaattagtattggttagctcaacgcctcacagcgcttacacacccaacctatcaacgtcgtagtcttcgacggcccttcagggaactcaaggttccagtgagatctcatcttgaggctagtttcccgcttagatgctttcagcggttatctattccgaacatagctacccggcaatgccactggcgtgacaaccggaacaccagaggttcgtccactccggtcctctcgtactaggagcagcccctctcaaatctcaaacgtccacggcagatagggaccgaactgtctcacgacgttctaaacccagctcgcgtaccactttaaatggcgaacagccatacccttgggaccggcttcagccccaggatgtgatgagccgacatcgaggtgccaaacaccgccgtcgatatgaactcttgggcggtatcagcctgttatccccggagtaccttttatccgttgagcgatggcccttccatacagaaccaccggatcactaagacctactttcgtacctgctcgacgtgtctgtctcgcagtcaagcgcgcttttgcctttatactctacgaccgatttccgaccggtctgagcgcaccttcgtactcctccgttactctttaggaggagaccgccccagtcaaactacccaccatacactgtcctcgatccggataacggacctgagttagaacctcaaagttgccagggtggtatttcaaggatggctccacgcagactggcgtccacgcttcaaagcctcccacctatcctacacaagcaaattcaaagtccagtgtaaagctatagtaaaggttcacggggtctttccgtctagccgcggatacactgcatcttcacagcgatttcaatttcactgagtctcgggtggagacagcgccgccatcgttacgccattcgtgcaggtcggaacttacccgacaaggaatttcgctaccttaggaccgttatagttacggccgccgtttaccggggcttcgatcaagagcttcgcgttagctaaccccatcaattaaccttccggcaccgggcaggcgtcacaccctatacgtccactttcgtgtttgcagagtgctgtgtttttaataaacagtcgcagcggcctggtatcttcgaccggcatgagcttacggagcaagtccttcaccctcaccggcgcaccttctcccgaagttacggtgccattttgcctagttccttcacccgagttctctcaagcgccttggtattctctacccaaccacctgtgtcggtttggggtacggttcctggttacctgaagcttagaagcttttcttggaagcatggcatcaaccacttcgctaactaaaagttagctcgtcatcagctctcggccttaagatcccggatttacctaagatctcagcctaccaccttaaacttggacaaccaacgccaagctggcctagccttctccgtccctccatcgcaataaccagaagtacaggaatattaacctgttttccatcgactacgcttttcagcctcgccttagggaccgactaaccctgcgtcgattaacgttgcgcaggaaaccttggtctttcggcgtgggtgtttttcacacccattgtcgttactcatgtcagcattcgcacttctgatacctccagcaagcttctcaactcaccttcacaggcttacagaacgctcctctaccgcatcacttacgtgatacccgtagcttcggtgtatggtttgagccccgttacatcttccgcgcaggccgactcgactagtgagctattacgctttctttaaagggtggctgcttctaagccaacctcctagctgtctaagccttcccacatcgtttcccacttaaccataactttgggaccttagctgacggtctgggttgtttcccttttcacgacggacgttagcacccgccgtgtgtctcccatgctcggcacttgtaggtattcggagtttgcatcggtttggtaagtcgggatgaccccctagccgaaacagtgctctaccccctacagtgatacatgaggcgctacctaaatagctttcgaggagaaccagctatctccgagcttgattagcctttcactccgatccacaggtcatccgctaacttttcaacggtagtcggttcggtcctccagttagtgttacccaaccttcaacctgcccatggatagatcgcccggtttcgggtctattcccagcgactagacgccctattaagactcgctttcgctacgcctcccctattcggttaagctcgccactgaaaataagtcgctgacccattatacaaaaggtacgcagtcacagaacaaagtctgctcccactgcttgtacgcatacggtttcaggatctatttcactcccctctccggggttcttttcgcctttccctcacggtactagttcactatcggtcagtcagtagtatttagccttggaggatggtccccccatattcagacaaagtttctcgtgctccgtcctactcgatttcatgactaagagattttcgcgtacagggctatcacccactatggccgcactttccagagcgttccgctaatctcaaagccacttaagggctagtccccgttcgctcgccactactaagggaatctcggttgatttcttttcctcagggtacttagatgtttcagttcccctggttcgcctcttacgcctatgtattcagcgtaagataaccatcttatgatggctgggttcccccattcagacatctccggatcaaagtctgtttgccgactccccgaagcttttcgcaggctaccacgtctttcatcgcctctgactgccaaggcatccaccgtatgcgcttcttcacttgaccatataaccccaagcaatctggttatactgtgaagacaacattcgccgaaaattcgaatttctcaactaagagaactcacaaattttaccttagcctgatccgttaccagtgaaagtaacgttcagtctatctttctatcacatacccaaatttttaaagaacgatctaatcaaagactagaaatcaacattcaccatcaacctgatggaatgctcatttctaagctttcataacgtagaagcagtagtggtggagccaaacgggatcgaaccgttgacctcctgcgtgcaaggcaggcgctctcccagctgagctatggccccgtatttctacaggcgtttcccacacaaaattggtgggtctgggcagattcgaactgccgacctcacccttatcaggggtgcgctctaaccaactgagctacagacccaatttcgggctgcttcttatcgtcttcttcaatgaatcaagcaattcgtgtgggaacttatggagcagctgatgtcgtcgattaaggaggtgatccagccgcaggttcccctacggctaccttgttacgacttcaccccagtcatgaatcacaccgtggtaaccgtcctcccgaaggttagactagctacttctggtgcaacccactcccatggtgtgacgggcggtgtgtacaaggcccgggaacgtattcaccgcgacattctgattcgcgattactagcgattccgacttcacgcagtcgagttgcagactgcgatccggactacgatcggttttatgggattagctccacctcgcggcttggcaaccctctgtaccgaccattgtagcacgtgtgtagcccaggccgtaagggccatgatgacttgacgtcatccccaccttcctccggtttgtcaccggcagtctccttagagtgcccaccataacgtgctggtaactaaggacaagggttgcgctcgttacgggacttaacccaacatctcacgacacgagctgacgacagccatgcagcacctgtctcaatgttcccgaaggcaccaatccatctctggaaagttcattggatgtcaaggcctggtaaggttcttcgcgttgcttcgaattaaaccacatgctccaccgcttgtgcgggcccccgtcaattcatttgagttttaaccttgcggccgtactccccaggcggtcaacttaatgcgttagctgcgccactaaaagctcaaggcttccaacggctagttgacatcgtttacggcgtggactaccagggtatctaatcctgtttgctccccacgctttcgcacctcagtgtcagtattagtccaggtggtcgccttcgccactggtgttccttcctatatctacgcatttcaccgctacacaggaaattccaccaccctctaccatactctagtcagtcagttttgaatgcagttcccaggttgagcccggggatttcacatccaacttaacaaaccacctacgcgcgctttacgcccagtaattccgattaacgcttgcaccctctgtattaccgcggctgctggcacagagttagccggtgcttattctgtcggtaacgtcaaaattgcagagtattaatctacaacccttcctcccaacttaaagtgctttacaatccgaagaccttcttcacacacgcggcatggctggatcaggctttcgcccattgtccaatattccccactgctgcctcccgtaggagtctggaccgtgtctcagttccagtgtgactgatcatcctctcagaccagttacggatcgtcgccttggtgagccattacctcaccaactagctaatccgacctaggctcatctgatagcgcaaggcccgaaggtcccctgctttctcccgtaggacgtatgcggtattagcgtccgtttccgaacgttatcccccactaccaggcagattcctaggcattactcacccgtccgccgctctcaagagaagcaagcttctctctaccgctcgacttgcatgtgttaggcctgccgccagcgttcaatctgagccatgatcaaactcttcagttcaaacatctttgggtttttaagaaaccctaaacttggctcagcaatcgttggttacatctttgatttctcgcggagtaacttgtgatgctgataatcttgttgactatcagtctgactccacaagcacccacacgaattgcttgattcagttgttaaagagcggttggttaagatctttcgtctcaaccgaggcgcgcattctacagcagcctcatttgctgtcaagtgattattttcagaagttttcgaagatttcttcaacaacttcaaccacttgcgcttccgatctctcgttagcgggaggcgaattctacagcgttacacgctgctgtcaacacctctttttctccgctttcgaccgagaggatcgaaacgttaatagagccaaacaacaccgctctatcaactccttctgggcttcgatgaactgaagcaactcactgtcgaatctcgcataactctttgtttaccaaggagttttccgtttcgactgtgccggaagtggggcgaattatagacttccagaatctgccgtcaacccctttttttcacatttctgtcatatcggtcaaaaagaccccagaaacgcaaaagccggccccaaggggccggctttcaaccctcactaggtcaagctagggaacgcaaattgcgacgcttcatggctggcccgctgcggccagcgctgggtgatcgccttgcgacgagtgtagaaacgcaccccatccggcccataggcatgcaagtcaccgaacagcgagcgcttccagccaccaaaactgtgatacgccaccgggactggcagcgggacgttaacaccaaccatgcccacttcgatctcatcacagaacaaacgcgcggcttcaccgtcacgggtaaagatgcaggtaccgttgccatactcgtgatcgttgattagttgcatcgccgcttccaggctgttcacccgaaccacgcacagcaccggcccaaagatctcttccttatagatacgcatctcaggcgttacgcgatcaaacaggctgccgcccaggaagaaaccctcctcatggcctgcaacactcagcccgcgaccatccaccaccaacttggcgcccgaagaaacaccgtcttctatatagccgctgactttgtcccgcgcctggccggtgaccaacggccccatatccaggccacacgacgtgcccgcaccaatcttcaatgccttgacctgcggcaccaacttggcgatcagcgcatccgccacctgatcacccacgcacactgctaccgagattgccatgcaacgttcaccgcaggaaccgtaagccgcacccatcaaggcactgaccgcgttatccaggtctgcatccggcatcagcaccgcgtggttcttcgccccgcccagcgcctgcacacgcttgccgcgcttggtcgcctcggaatagatgtactcggcaatcggcgtcgagcctacaaaactcaaagccttcacttccggcgcttcgatcagcgcatctactgcgcccttatcgccgtggaccacactcagcacacctttgggcagacccgcttcttgcagcaattgcgcaatcagcagcgtcgagcttggatcacgctccgatggtttcaggataaaacagttgccgcagacgatcgccaacgggtacatccacaacggcaccatcgccgggaagttgaacggcgtaataccggccaccacgcccaagggctggaaatccgaccacgcatcaatgttcggcccaacgttgcggctgtactcgcccttgagaatctccggcgccgagcacgcgtattccacgttctcgatcccgcgcttcagctcaccggccgcatcttccagcgtcttgccatgctcttcgctgatcaattgtgaaatgcgggcttcgttctgttccagcaattgcttgaaacgaaacatcacctgggcgcgctttgccggcggggtattacgccaggccggaaacgcggccttggccgagtcgatcgcctgttgaatggtttcacggctggccaacggcacctggtgaatcacctggccggtggacgggttgtacacgtcggcactacgaccgctgtcattgaccaactcaccgttgatcaaatgctggataaggctcatgcagggctcctgaaaagttgttctatatagaaggagaaatcagtcgatcttgttcagcacttcgccgaccgcatcaaacaggcggtccaggtcctgcggcttgctgttgaaggttggcccgaactgcagggtgtcaccaccaaagcgcacgtagaaacccgccttccacaaggccatgccggcctcgaacggacgcacaatggcatcaccgtcacgcggggcaatctggatcgcacccgccaggccgtagttacgaatgtcgatcacgttcttgctgcccttcaaaccgtgcagcgcattctcaaagtgtggcgcgacttcagccacgctttgcaccagattttccttctgcaacaggtccagtgccgccaggccggccgcgcacgcgaccgggtgcgccgagtaggtgtagccgtgagggaattccaccgcgtactcaggcgtcgcctggttcatgaaggtttgataaatctcgctgctggcaatcaccgcgcccatcgggatcgcgccgttggtgacttgtttggcgatgcacatcaggtccggagtcacgccgaagctgtcagcgccgaacatggagccggtgcgaccaaaaccggtaatgacttcgtcgaacaccagcaggatgttgtgttggtcgcagatttcgcgaagacgcttgagatagccctgtggcgggaccagcacaccagcggaaccggccatcggctccacgaacaccgccgcgatgttcgacgcgtcatgcaactcgatcagcttgagcagttcatcagccagcgcgataccacccagctccggcatgccgcgagagaaggcattgctcgccagcaaggtgtgcggtagatggtcaacatccatcagcccctgaccaaaaatcttacggttgccgttcacaccgccgaggctggtgccggcaatgttcacgccgtgataaccacgggcacggccaatcattttggttttggtggcctggcctttcaggcgccagtacgcgcgcaccatcttcactgcagtatcggcacactcggagccggagtcggtgaagaacacgtggttcaggttgcccggggtcaggtcagtgatcttttccgctaattggaaggacagcggatggccgtattggaagcccggcgaataatccaaagtgcccagttgcttggcgactgcctcctggatttccttacgcgtatgcccggcgccgcaagtccacaggcccgacaacgaatcgtataccttgcgccccttgtcatcgatcaaccagctaccctcagcccccacgatcaaacgcggatcacgctggaagttacggttggcggtgtaaggcatccagtgcgcgtccagcttcagttggctggccagggacgaaggggcgttttcgggcatgttcatcagcaaaacctcgcaaggcaaaaggcagcgtcgggattgaaaagcgttgttgcagctaaattgccacggcgataaagtcggtgaaattcaacttttctaaccttcagtcaggcctttactaaactatgagcagccgccgacccgacccgcttgcccaagtcagcgacttcgacatccgcctgttgcgcatcttccgcagtgtggtggaatgcggcggcttttcggcggcagaaaccgtgctcggcataggccgctcggccatcagccagcagatgagtgacctcgagcagcgccttgggttaagactctgccagcgcggccgcgccggcttttccctgaccgaagaaggccgtgaggtctaccaatctgccctgcaactgctaagtgccctggaaagcttccgcactgaagtcaacggactgcaccagcatttgcgcggtgagctgatcattggcctcactgataacctcgtgaccctgccccacatgcgtatcacccacgcactggcgcaactaaaggagcgcggcccggacgtgcagatccagatccgcatgatcgcccccaacgaggtggaacaaggtgtactcgacggccgcctgcatgtcggcgttgtgccacaagccagcgccttgtcggggctggaataccaaccgctctacagcgagcgctcgctgctgtattgcgccgtcggccacccactgttttacgccgacgacaaacaactggacgacacccgcatcgacagccaggacgccattgcccccaccttccgcctgcccgccgagatccaggcgcattaccaggccctcaactgcaccgcgagcgcttcggaccgcgaaggcatggcgttcctgattctcaccggccgctatatcggctacctgcccgatcactacgccagcctttgggtacaacaaggccggctgcgcgcgctgaaaccggctacacgcttttacgatttaagcctcgcatcggtcacgcgcaaaggccgtcgccctcatttggtgctggagagttttctggaaagtctggccgcgacgcgctagctcgggcctttcgttaaaacttgagcaagtggacagctttttgcaaggagaccagcaccttgaactgtccgccccgggtttgcacaccatgccaccagaatcatccagctccagcgacctgatctacggtctcaacgaccgcccaaaacccgctcctgccgtgttggctgctctgcagcatgtactggcggccttcgtcggcatcatcacgccgccgttgatcatcggctccacgctgggcctgaccgctcacctgccctacctgatcagcatggcgttgatggtttccggcgtgggcactttcatccaggcgcgcaggccgtttggtatcggcgccggaatgatttgcctgcaaggcaccagttttgcgtttctgggcgccgtgctgtcggcgggttttctggtgaaacaacgcggcggcagcccggaagacatcatggcaatgatcttcggcgtatgctttttcggggcggcggtgcagatcgtattgagccggtttatcgggcaattgcgcagggtcatcacgccactggtcaccggcattgtgatcaccttgatcggcgtcagcctgatcaaggtcggcatcactgacctcggcggcggcttcaacgcccctgatttcggcgcgccgatcaacctggcgctgggtgtgttcgtggtgctgaccatcatcctgctcaaccgctcgaacaccccgtgggtgcgcttgtcagcgatcatcatcggcctcgccgtcggcagcctcgccgcatggttcagcggcaaactggtcccccaagccttgcccgacttgccgctgatcagcgtccccctcccgttccgcttcggtttcaacttcgactggagcgctttcctgccgatcgcgctgatttatctgatcagcagtatcgaaaccgtcggcgacctcaccgccaactgcatgattgcgcgccaacccatcagtggcccttcttatataagccggctcaagggcggcgtactcggcgatggcgtgagctgcatgatcgccgccaccttcagcgccttccccaacaccacgtttgcgcagaacaacggcgtaatccaactcaccggcgtggccagccgttacgtcggcttatacattggcgtgctgctgttttgcctcggtttgtttccgctgattggcgcggtgttgcagcaaatccccaagccggtattgggcggcgccaccttggtgatgttcggcagcgtcgccgccgccggcgtgcgcatcctcgcccaggcaccgctggaccggcgcagcatgctgatcattgccacctcttttggcgtaggcctcggtattgcggcccaacccgaccttttgcacctaatgccaagcctggtgcaaaacctgttcgactcggccatcaccagcggcgggctgacggccatcgtgttgtgcctgctgctgccggaggccaaagcgacgcgcgatgccgcaaaccacgcgccaaaaagcgacacactggaaccgctttgacggttttattgcatcgggacttgtctgaggcttgagggtgggttatctgtgcacacgtcgtctctatcgatcagcacggaaacctccatgagcctcgaagttcctgcccacagcaaccacgccggtaagcccgccagccgcattcggcaaaagaacgaacaagcgattctgcaggctgctgaagacgagttcgcgcgccatggctataaaggcaccagcatgaacaccattgcgtcgagtgccgggctgcccaaggccaatttgcattactacttcaccaacaaactgggcctgtacattgcggtgctcagcaacatcctcgacctgtgggacagcaccttcaacgcgctgaccgccgaggatgaccccgctgtggccctcacccgctacatccgcaccaagatggagttctcgcggcgccacccgcaagcctcgcggatcttcgccatggagatcatcagcggcggcgaatgcctcaccgaatatttcagccaggattaccgcgcctggttcagcggccgggcggcagtgttccaggcctggatcgaggccggcaaaatggaccccgtcgaccccgtgcacctgatcttcctgctgtggggcagcacccagcactacgccgacttcgcaacccaaatctgccgcgtcaccgggcgcaccaagctgaccaagcaggacatggaagacgccggcaataacctgatccacatcatcctcaagggctgtggcatcaagccggccctctaaacgaagcgacttatgcctttcacgctcaccggcctttgcgaatttcgtgaagaaatacgcaaaagccgtttcatcaccctcgccgcgccgatcaccagttcgcaagacgcccaggcgtttttcgagcaacacagcgacctcaatgccacgcacaactgctgggcctggaagctggcggaccaataccgcagcaatgacgatggcgaacccggcggtaccgctgggcggccgattctggcggcgattgaagcccaagggtttgatcaggtcgcggtgctggtgattcgctggtacggcggcatccaactcggcactggcggcctggcccgtgcctacggcggtggcgccaacaaatgcctgcaaaccgccgaacgcattgagctgatcagccgcgtgccgctgagttgcgcttgcagtttctccgagttgaacctggtcaaactgcgtgttgccgaactgggcgggctggtggtggaggaaacgttcactgccaatggcgtcgagctacagctcgccttgggcgaagcgcatatcgacaccctgcaaattcaactcgccgacctcagccgtgggcgtatcctgctacaacgttgaactcactgaaccgcgactcttaaaggaagccttcatgtctacgccaaaaactgcactgatcatcggcgcctcgcgcgggctgggccttggcctggtcaagcaactgctcaaggacggctgggacgtgactgccaccgtgcgtgacccgaacaaggccgatgccctgaaagccgtgggcccggtgaagatcgagaagctggacatggacgaccagcaagcggtaatcgcgctgagccagcgcctcaaggagcgcactttcgacctgctgttcgtcaacgccggcgtcaagggcccggccaatcaggagccaggccacgccacgctggcagaagtcggccaactgttcttcaccaacgccgtggcgccgatcaacctggcccagcgctttgtcgggcaaatccgcaaagacagtggcgtgctggccttcatgagttccgtactgggcagcgtgaccattcctgacggctccgacctggcgctctataaggccagcaaggccgcgctcaactccatgaccaacagcttcatcacccaactgggcgaccacaagctcaccgtactgtctttgcacccgggctgggtaaagaccgacatgggcggtgaaaacgcgcacatcgatgtcgacaccagcgtgcgcggcctggttgaccaagtgaatgcctacacgggcaaaggcggccaccacttcatcgactacaaaggcgacaccatcgcctggtaaatcctcggtccactgtgggagcgggcttgcccgcgatgatcttgagagcacctcgctcctacagctagacccgatcccgaactccacgtaatctacccccctcgccttcaccggcgaccctggatcagcagacagggcaacactgagctggcaaacctgaacccatcattcagaggagccggccaatgcctgcgacccgtatctggttaaaaaaccccctcgcgattttcactgccaacgacctcgacgcccgtggtggcctggtgctgcaagacggtgtgatcaccgaagtgctgggctggggacgtgaacccagcgtgccctgcgggcaagtcttcgacgcccgcgagcatgtgatcctgccgggcctgatcaacacccatcaccacttctaccaaaccctgacccgcgcctgggcgccggtagtcaaccagcctttattcccgtggttgaaaaccctgtacccggtgtgggcacggctgaccccggaaaaactcgcgctggcgtccaaggtcgccctcgccgaattgctgctctcgggctgcaccacggcggcagaccaccattacctgttccccgacggcctggaaaacgccatcgacgtacaagtcgaaagcgtacgcgaactgggcatgcgcgccatgctcacccgtggttccatgagcctgggcgaagccgatggcggcctgccaccgcagcaaaccgtgcagcaaggccaagtgattctcgaagacagccagcgcctgatccgcgcgtaccacgagcgcggcgacggggcgcaaatccagatcgccctggcgccttgctcgccgttttccgtgaccccggaaatcatggaagccagcgccgaactggccaacagcctcgacgtgcgcctgcacacccacttggcggaaaccctcgacgaagaagacttctgcctgcaacgcttcggcctgcgcacggtggactatctcgacagcgtcggctggctcggcccgcgcacatggctggcccacggcattcacttcaacccggatgaaatcgcacgcctgggtgccgccggcacgggtatttgccattgcccgagttcgaatatgcgcctggcttcgggtatctgcccaacgctggatttgctcgctgccggggcgccaatcggcctgggcgtggacggttcggcctccaacgacgcgtcaaacatgatcctcgaagcccgccaggcgctttacatccagcgcctgcgttatggcgcagaaaagatcacgcccgaaggtgtactcggctgggcgaccaaagggtcggcgcggttgctggggcgtacggatatcggtgaattggccgtaggcaaacaggccgacctggcgctgttcaagctcgacgagctgcgcttctccggcagccatgacccgatttcggcgctgttgttgtgcggtgctgaccgcgccgaccgggtgatgattggcggtaaatggcgagtgattgatggccaggtcgaagggctggatctcaaaggcttgattgccgatcacagccaggcggcgcggcagttaatcgctggcgcctaatgaaaatgtagaggctgccccctgtgggagctggcttgcctgcgatggcatcacttcggtgcaactgaaaaaccgaggggcctgcatcgcaggcaagccagctcccacattgggctcagtgttgattcgaaaaacgggttacaaacccagcaacgacaacataataaacgtcgcaaacaacacaaaatgcgtcatcccttcgatggcattggtttcaccatcgttgaggttgatcgcactgacaatcagcgtgataaacaccatcacggtctgcaccggcgtcatcgccatctggaacggctggccagtgtaaagcgccatggcttccatcaccggcacggtcaaaatcaccgtcgacaacgaagcgcccagcgcgatgttgaccaccgactgcatgcggttagccaaggcagcgcgcaaggccgtcagaatttccggtgccgcagaaatggccgccaccacaatcgccgtgatcaccggcggcgcacctgtgccttccaggccaaggtcgagggttttcgacatcacctcggccagcgcaccaatcacaatcaccccaaacaccagggtgccgatggaaaacgccaggttgatcggcagcgcctcgtcttcttccggctgtttcttgcggcgtttttccgggtagctgtagctgaaaaaataactgtgcggccccacctgcatgcgcaggaacaaggtgtagagcaacaccatcgcgccaatggtgaaggctgagtaaattttccagtcagcctcggggataaattccggcaccaccatggacacgcccatggcggtgaggatcatcacgctgtaactgcgcgctgagtcatcgttataggactgctcgccatgcttgatgccgcccatcagcgcggccaaaccgaggatgccgttgatatcgagcatcaccgccgagtaaatcgtgtcacgcaccagggtcggcgagggctcgttactcatcatgatcgccaggatcaccacttccaccagcacggcggcaagcgtcaggatcatggtgccgtacgggtcgccgactttttccgcgagttgctcggcatggtgcgccacgcgcatcgaggccacgacgataaaaccgatcagcaccacgccgccgagcagcgcaatcatttgcccgctgttgagcatccagtgctccagcgggtaggcggcgatggcggcaatcagcgccagcagcatgaatttttcttgcttgagggatgtgagcattccgggccttttggtgcagcaaatcagtcattgatggggtacagactgcgccatgtcgctaacgtttcgttacaccttagttcacgccgcccttgcgtgaataaaaccaatactctcctgctggtcaggttttgccgattatttcagccatggcctgtagaatgccgccattgcacctgatgagaatttagaaaatgtacgattggctcaacgccctgcccaaggctgaattgcacctgcacctggaaggctcgctggagcctgagctgctgttcgccctggccgagcgcaacaaaatcgcactgccgtggaacgacgtcgaaaccctgcgcaaggcctacgccttcaacaacctgcaagagtttctcgacctgtattacaagggcgccgacgtgctgcgcacctcccaggatttctacgacctgacctgggcgtatctgctgcgctgcaaagaacagaatgtgatccacactgaacccttcttcgacccgcaaacccacaccgaccgtggcattccgtttgaagtggtgctcaacggcatcgccgctgcactcaaggatggcgagcagcaactgggcatcaccagcggtttgatcctgagcttcctgcgccatttgagtgaagacgaagcacagaaaaccctcgaccaggcgctgccgttccgcgacgcgtttgtggccgtgggcctggacagttcggaaatgggccacccgccgagcaagttccagcgcgtgttcgacagtgcccgtcacgagggcttcctcaccgtggcccacgccggcgaagaaggcccgccggaatacatctgggaagccatcgacctgttgaaaatccagcgcatcgaccatggcgtgcgggccatcgaagatgagcgtttgatgcagcgcatcatcgacgaacagatcccgctgaccgtctgcccgctgtccaataccaagctgtgtgtgttcgacgacatggcccagcacaacatcctcgacatgctggagcgtggcgtgaaggtgacggtgaactcggatgacccggcgtacttcggcggttacgtgaccgagaatttccacgcgctgcatactgcattgggcatgacccaggaccaggccaaacgcctggcgcagaacagcctggatgcgcggttggtcaagccataactggctgaatgaatacggtctaaatgtgggagctggcttgcctgcgatagcatcacctcggtgcaactgaaaaaccgaggcgcccgcatcgcaggcaagacagctcccacaccggttttgtatgggtcgttaaatttcagtcagttcttccagggtcttgcccttcgtctccatcccgaacacccacaccaccagcgccgccaccgcaaaacacagcgcgcccaaggcaaacaccccgccctgcccggtcaccggaaacaccagcccggtcaccaaaggcccaagcaacgacccgacccggccaatcgccgatgcaaacccggaaccggtcgcccgcgccgaggtggggtacaactccggcgtgtaggtgtacagcacggcccacataccaaacagaaagaactgcatcaacaagcccgaggtgatcaacagccccacgttgccgccaaataccgcactctgcccatacagaaacgccatcaccccgccgccgagcaaggtcacgacacacacgggtttgcggccccagcgctccaccagccacgcggccatcaagaaaccgggaatcccgcccagggagatgatcaccgtataatacaccgactgcgtcacggcaaaacccgactgctgcaacaacgcgctgagccacgaggtcagcccgtaaaagccgagcaacgcaaagaaccacacgctccagatcatcatcgtgcgttggcggtactgcgccgaccacagttgatgaaatgccgagaaaaaattccccggcgcactctccacccgtggcaaacggatcggctccggcaagtcggcacgccccaatgagtcgcggactttttgttcaatgcccaacaacaccttgtctgccacctcatgccgtccggcctgctccagccagcgcggcgactccgggataaaaaagcggatggccaggacaaagactgccggcaccgccagcaccaggaagatgtcacgccagccgatcactggcagcaggaagtaagacagcacacccgccgccacaaaacccagcggccagaagccgtccatcaaggcgatatagcgcccacggcccttggcggggatcagctcggagagcatcgactgtgctatcggaaactccatgcccatgccgatgcccagcaagatacgaaataatgtcagcgtctctaccgtctgcgccgtggagcacaggtagctggcgacgccccataacacaatgctccactgaaacaccggcttgcgcccaaagcgatccgccagcatccccgacaacgacgcgcccaccaccatgccgaaaaaactcgaactggcaagcaacccggcctgagccgtactcaggccaaactcggttttgatcgagcccaacagaaaggtcatcatcgccaggtccatggagtcgaagaaaaacgccagggcgatgatgatgaagatgatccggtggtaaccgctgatgggtaaccgttccagccgttccgctgcgctatagcctgccatacccatgccgcaccccctgtgtgaaaaatccccaaggcgagtgtgcggcatcgttttgccctgctattgctggatacgacctgactgaaactgtgaacgacgcaacgttggctaaggctcaacgtgtgcggccagccggctgatttccgagaggccgagttccgtgaccgacagtgcccgagactcgttgatcacgttgatccagcccgactgtaaaaacagttgcatcagccctgcccccaatgcaccgccgaggtgcggttgctgctggctccagtcaaaacagtcgcacaccagcggtgacgccagcgcctgggtgaaaatacccaacctcgcaagctgccgcgcaccactgagcgtgatgtctgtacgttgctcaccgcgttcaagccagccgccccccaccattctttgatacaacgcggctgccagctcaccgcccaggtggccatggcacaaccgggcgtgacgcagcggcggcggggccaccagcgcgggcggcaagacatccggcgagcaacgcacggcgctggctacagtggtcaccgccaacgcgtcaatcgcggcactcacgtccgtcgccgccacacgaaacaagcgctggcctcgccgcgcctcggtgcgcagcaagccgctgccgatcagccgcgccaagtgcgcattggccgatgctgaagacaggccagccaccctcgccagctcctgcgctgactttgccgaaccgtccatcaaggcccagagcatggcggtgcgcttgggctcggcaagcaagctggcgatctgactgatgcaaggtgcttcttccataggttcactccctgttgatcatttgtctgcagcggtttgcgccaaagtataggggcgcaaaccgccggttccgcgaggtctgacagcgcgaatagggacaggatctgagtgaaatttccggcttttgtggaggctattgcggcgtgttcaatcgctccggccagagcgcggtcaacgtcgcacagcgggccacgagcatttcgcgcagcaggttaatcggtttgctcaattgcgcacggtgggcgcacagcagattgagcggcgtgcgctcgcctcgcagctccggcaggaccacgcgcaatcgccccgccaacacgtcggaactcacatccagccaggacttgtaggcaatgcccacgcctgccaccgcccagcggcgcaccacatcggcgtcgtcactgaaacggtcgccggtcaccgtcaggctgacctcacgcttgccgtcgtgaaaactccaatggtcatgcacccggctgccgagcatgtacagcaagcaattgtgctgggccagttgttccaggtggcggggctcgccatgccgtgcgaggtagccaggggcggcacacaacacgcgcaggttgtccggggcgatgggcagcgcgatcaggctggaatcctcgggctcaccataacgcagggcaatgtccaccggctggcggaacaggtcggcaatccggtcgcccagcagcaggcgtacgctcagttgcgggtgctcacgctggaactcatccagccacggcaaaagttggttgcggccaaagtccgagggcgccgagagctgcaatacgccactgacatggtcctggccgctggccaatagccgccgcccttcatccagcgaacccaacgcggcacgggcgtattccagaaagccttcgccttcggcggtcaaacgcaggctgcgggtggaccgcgccagcaagcgcgtgcccaattgctgttcgatgcgcttgagcgccgcgctggccacggcgggcgataagtccatgacccgcgcagccgccgacaaactgcccaggtccgccgcgcgtacaaacagctgtaaatcgtcaaaacgcagcactttgaacacccattatcaaaatttcattgaaacagacctctgttttagccgcttttatcttcacgggaaaatagccaatcatctggccatcccgttcatcacgtgtcaggagttgaatatgtccaccgcctttaacgtcatcgccacgctgatcgccaaacctggccaacacgccaccctggaaaccctgctgcgcggcctgctggaacccacccgtctcgaagccggttgcgaacaatacgacctgcaccaagacctgcaacaccccgaaaccttctacatgctcgagcgctggagcgacgacgcggccttggccgaccacgacgagagcgcgcatatccagagctttcgcgccaaagccgctgatgtacttgaacacttcgaactcaagcgtctgaaatttctcgcttgatcactgccctttttccggagttaccatgaaagccattgcctactacgcgtcactgccgatcaacgatccaaaagccctgcaagacatcgaactgccagcgccggtcgccggcccgcgcgacctgctggtggaagtcaaagccatctcggtcaacccggtggacaccaaggtgcgccagaacgtccccccggaaaacggcgccgccaaggtgctgggctgggacgtggccggtgtggtcaaggcggtcggcagcgacgtgacgctgttcaaggccggtgacaaggtgttctacgccggttccctggttcgcccgggcggcaacagcgaactgcacaccgtggacgaacgcatcgtcggccatatgccgaaaagcctggggttcgccgaagccgccgcgctgccactgaccgcaatcaccgcctgggaactgctgttcgagcgcctgcaagtgcgtgaaggcaaaaaagatgaaggccagagcctgctgatcgtcggcgccgccggtggcgtgggttcgatcctgacccaactggccagccagctcaccgcgctgaaagtcatcggcaccgcctcgcgcccggagactcaggaatgggccaaggccttgggcgccgacctggtgatcgaccacagccagccattgagcgaagcactgaaagctgccggccacgcccaagtgacccacgtcgccagcctgacccagaccgaccatcacctggaccaactggtcgaagccctgcagcctcaaggcaagctggcgctgatcgacgatcccaaggcgctggacgtcagcaaactcaagcgcaagagcctgtcgctgcactgggagttcatgtacacccgctcgatgttcgagaccccggacatgatcgagcagcacaacctgctcaaccgcgtggcagaactgatcgacgcgggcacgctgaaaaccacggtgggcgagcactttggtgtgatcaacgccgagaacctgcgccgcgcccatgccctgctggaaagcggcaaggccaagggcaagatcgtgctggaagggttctgaaaaaggtctatcagtgtcgtccgttattcctgtgagtaatggacgacaccgctagtcagagagttgatctttgtcatatttgtgaacgtattcgggtttatattggccgcctttgccacgattcttttacgtgaggaagtcagcaatgaagatcctgataaaagcgttagcaaaatccccaggccacaaatggcaggtcagcctcgacggtgatgccttcacctttcgcaatgaagccgaagcccgcgccttcgccgacaccctgcaagcgcgcatccaggcgccgcaccgctttcctctcagccagcaacgttccgccgccggctgatccgctttttcagacctgcgcctgcgcggcccttgcccgttgcaggcgctgggtcgacaccgccaccgtgaccgccaatacaccgcacaagctgatgaccatggccatcggcatcgccgtgccgtcgtgcaacacaccgaccaacgacgcagcccccgccgccacaccgaactgaatgcagccgagcaacgccgacgcgctaccggcgcgcgcgccctgcccggccatggcgcaggccgaggtgttgggcaaaatacagcccaagctggcgatgcagataaacagtggcaccagcaatggccacagcgcgtcagtgcgcagcgccgtaatgcccagtagcgtcaaagccgctgccacataaacccataccgtgcgcgacaacaagaacgccggcccacgcttggacagtaaccgcgcattgagctgcgccaccaggatgaagcccgcggcattggagccgaacagccagccgtaatgctcgggcgccacgccatagagtttgatgaaaacgaacggtgaaccggcgatgtaggcaaacatcccggcaatcgagataccgcccgtcagggcgtaaccgagatagacccggtccgacaacaggctgccataccggcgcagtgacccagacagaggttggcggggcttgtcggcaggaaaggtttccggcagcccgacagccacggcaatggcggccatcacgctgaatatcgacagcgccaggaaaatcgactgccagccccacaccccgaccatcaccccgcccgccaacggcgcaagaatcggcgccagcccggtcacgagcatcagttgtgaatacaccttggccgagccaacggcatcacatttgtcgctgaccaccgcgcgggaaatcaccatgcccgcgcaaccgccgagggcctgcacgaagcgcgcgccgatcagccattccagagagggcgcgtatgcgcaggcgaaggacgccagggtaaacagggtgacgccactgagcagcgggccgcgccgaccgaaacggtccgccagcgggccatagatcaactggccgatggccaggcctgcgaagtagacggccagggtcagttggacatgtttttcgtcggtggcaaacgccgcagcgatcgccggaaagcccggcaggtaaaagtcgatcgccaacggcgcgaaggcgctcaaggcgcccaggatcaggattatgcggaggttcatcagacacccaagtgagtcggcagcccgacagtctagccgcgcttgggtgccatgaacattacgatagctcgctaactatcggaaatttcacgcgagcttgacgctgtagccttcttcgctgatcaaactgatgacctgatcggcagacaagcggctttccacgcccacctctttagcggccaggtcaaccttcacactggccgccgggtcctggctctgcaccgcctgggtcaccgcacgaacgcaatggccgcaggtcattccttcaacgctgaatacttgcatgggatggctccttcaataaaagttgcatagtgagcggggtaaagcgagtgtcgaccttgccatcatggcaaggtcaagttctgaaaatatcggccgggctggtattcggcggccgcctcggccaagcttcatccatcttgtatgtgaaccacggagcattcgccatgcgctggtcgttttttggccttgtcggcctgatgagcttgtctgccgctgtacctctggccaacgcagctgaagactatgcagtgctgatcatctcgcgcgagcgcctggaagtgccgaccaactgcgagatcggcctgtatatccaagaccagttggccgggcggctgttccaggaacagtccacctcgttcaacctgccagcgggaaatgtgtcgttgcgcctcaagctgctgccgggtcagtcgcaaggttgcctgccgggcatgctcgcgccgccggcacagaacatcacactgaaagccggtgatgtgcgcaagttgcgtatcgcccaaggcccggacggcatgtacctgaaacccgccgcgttggaatattaaagccgcttgaccttccccacaggtcaaggttgatcctaggggcaacttcttctggaggactgccccatgaatggatccaccacctttgacctgcctatcagcggtatgacttgcgccagctgtgccggccgcgtcgagcgtgcgctgggcaaagtgccgggggtgcaaaccgtcagcgtcaacctggccaacgagcgcgcccatgtcgaagtgctgggccagatggaccccggcgtgctgatcgccgccctcgacaaagccggttacaccgccaccttgccgcaaagtgaaaccgctaccgccgccgaccagaccgagcgcctgcaccgcgagcgctgggcgttgctgctggcaatcgccttggctttgccgttggtgctaccgatgctggtggaaccctttggcctgcattggatgctcccggcctgggtgcagttcgccctggccacgcccgtgcagtttatctttggcgcgcgtttctatatcgccgcgtggaaagccgtgcgtgctggcgccggcaacatggacttgctggtcgccatcggcaccagcgccggctacggcctgagcctctatgaatggctcaccgcgccagcgggcagcatgcctcacctgtatttcgaagcgtccgcggtggtgatcgcgctggtgctgctcggcaaatacctggaaagccgcgccaaacgccagaccgccagcgccatccgtgcgcttgaagcgctgcgcccggagcgtgccattcgggtggttgaaggccgcgaagaagatgtcgccatcaccgcgttgaagctcaacgatcttgtgctggtcaaacccggcgagcgtttcccggtggacggcgaagtggtggacggccagagccatgccgacgaagcactgatcagcggtgaaagcctgccggtgcccaaacaacccggcgacaaggtcaccggcggcgcaatcaatggcgagggccgtttgctggtgcgcacccaggccctcggcgccgaaagcgtgctggcgcggatcatccgcctggtagaagacgcccaggccgccaaggcgccgatccagaagctggtggataaggtcagccaagtgttcgtgccggcggtgctcgtgctggcattgatcacactggtgggctggtggctgtatggcgcgccgttggaaactgcgattatcaatgccgtcgccgtgctggtgatcgcctgcccctgtgcattggggctggccacaccgaccgcaatcatggccggcaccggcgtcgccgcgcgctacggcattctgatcaaggacgccgaagccctggaacgcgcccatcaagtgagtgccgtggtgttcgacaagaccggcaccctcacttccggcgcgccaaaaattgcgcacttggcggcggtggacggtaacgaagccctgctgctgcaacaagccggtgcgttgcaacgtggcagcgaacacccgctggccaaggctgtgctcgatgcgtgcagcgaacgcgggttgcgcgtcgcggatgtgagcgccagccaatccctgaccgggcgcggcattgcgggcacactcgacggtcggcaactggccctgggcaatcggcgcatgctggaagaaagcggcttgaacgcaggcgacctcgcaagcctggccaaaggctgggaagccgaaggccgcacgctgtcctggctgatcgaactgggcgcaataccgcgcgtgctggggttgttcgcctttggcgacacgctcaagcccggcgcattaaaagccgtggagaaactcaaggcacagcacatcagcagccatctgctgaccggcgacaatcgcggcagcgcccgagtggtcgccgaggccctgggcattgaggacgtgcacgcagaagtcctcccggccgacaaagccgccacagtggcagcgcttaaaaaaaccggtgtggtcgccatggtcggcgacggcatcaacgacgccccggcgctggccgcagcggatatcggcatcgccatgggtggcggcaccgacgtggcgatgcacgcggccggcatcaccctgatgcgcggcgacccgcgcctggtgccggcggcgctggaaatcagccgcaagacttacgcaaaaatccgccagaatctgttctgggcctttgtgtataacctgatcggcattccactggcggccttcggcctgctcaacccggtactggctggcgccgcgatggcgctgtccagcgtcagtgtggtgagcaatgccttgttgctgaaaacctggaaacccgaggatttggaggatcaacgcccatgaacatcggccaagccgcccgccagagcgggctgagcgccaagatgattcgctattacgaatccatcggcttgctgaaagccgcgcaccgcaccgacagcggctaccgcgtgtatggcagcgatgacttgcacacgctggcgtttatcaaacgttcgcgggacctggggttttcattggaagaggtcggcaagctgctcacactgtggcaggaccggcaacgggccagcgccgacgtgaaagccttggcgcgccagcatatcaatgagctgaatcagaagattctggaactggggcagttgcgcgatacgttgcaggacctggtggagcattgccagggcgatcaccggccggactgcccgattctcaaggaattggctgccggcagctgctgcacctgaaaggacggacacaaaacaactgtgggagctggtttgtgtgggagctggcttgcctgcgatgcagacacctcggtacatcagttacaccgaggtaatgctatcgcaggcaagccagctcccacacaggccagctcccgcagggttactgcatccagggcggcggcggttcttcggccgtcttggtcgggggcgcatcatccgctgcacgaatcgcctgacgacgctcttcgtccagccgcgccgcttcgatctcacgaatcacgccgcctacgtccgccagttcttccggctcgtcaaactccccggtcaagacgctggccgggtgcaaggtgccggcttcgtacagcgcccacatttccttggcgtacttggtcttcttcaactccggggcgaagcgcccgaagtaggaagccatgttgcccacgtcgcgctccagcatgctgaacgcatggttgttgcccgccgcatccaccgcctggggcaggtcgataatcaccgggcccgtcggggtcagcagtacgttgaactcggacaggtcaccgtgtaccaggccggtgcacagcatcagcacgatctgtgagatcaggaaagcgtggtactcgcgcgcctgatccggctccagcaccacgtcgttcaagcgcggcgccgcatcgccatactcgtcggcgaccagttccatcaacagcacgccttccaggaagtcgaacggctgaggcacgcgaacacctgcgccggccaggcggaacaacgccgccacttcggcgttctgccaggcatcttcggtttctttcttgccgaacttggagcccttggccatggcgcgggcctggcggctgttacggaccttacggccttcctggtactcggacgcctgacgaaaacttcgtttatttgcctccttgtaaaccttggcgcaacgcaattcattgccgcagcgcaccacataaacagctgcttctttaccactcatgagtgggcgcagcacttcgtcgaccagaccgtcttcgatcaggggttcaatgcgtttaggagtcttcatcagcttttattgtgggtcctgtattaccaaacacgcgtgtggcactcgttatacggcaatcagcccgccggtgggagaggctgccgaccgttgatcacttcagaatgcatccaatatgccagtttcaccgttcaatgatcgctgtaacaccctgcccgcccgctgcgcagatcgaaatcagccctcggcccttgcccgccgcatccagcaatttagccaggttggcgacgatgcgcccgcccgtggcggcaaacgggtgccccgccgccagcgagctgcctttgacattcagccggctgcggtcgattgagcccagcggcgcatccagccccaggcgcgtcttgcagtactcggcgtcttcccaggccttgagcgtacacaacacttgggccgcaaaggcttcgtgaatttcgtaataatcaaaatcctgcagggtcagaccatttctggccaacaaacgtggcacggcatacaccggggccattaacaggccttcggcaccgttgacgaaatctacagccgccgcctcgccgtcacgcaaataagccagaatcggcaagccgcgctcttctgcccacgcttcactgcccagcagcaccagggatgcaccatcggtgagcggggtggagttgccggcggtcagcgtgcccttttcgctgcgctcgaacaccggcttgaggctggcgagcttttccagggtcaggtcggggcgcaggttgttgtcgcgggtcaggccgagaaacggcgtgagcaaatcgttgtgccaaccttcggcgtaggacgcggccattttctgatggctttccagggcgagctggtcttgctcggcacggggaatctgccaggtttgcgccatcagctcgcaatgctcgcccatggacaaaccggtgcgcggctcgccattgcgcggcagctcgggtttgaggtgacggggacgaagttgtaacaaggcttttaatttatccgccatggatttgctgcgattggcctgcagcaggattttgcgcagcccttcattaacaccgatcggcgcgtcggacgtggtgtccacgccgccggcaatcgcgcattcaatctggcccaacgcaatcttgttggccaccagcaatgccgcctcaagcccggtgccacaggcttgctggatatcgtaggccggggtttgcggcgacaggcgcgagcccagcacgcattcgcgggtgaggttgaagtcgcgcgagtgcttgagcaccgcgccggcggccacttcgcccaggcgcaggccgtgcaggttgtagcgttcgatcaggccctccagggctgcggtcagcatggcctggttgctcgccgtggcgtaagggccattggagcgggcgaaaggaatgcggttaccgccaatgatcgctacacggcgcaattgagtcatggaaagctccctgtcagatgtgggctggatctcttagcctagcctaggctgatcgaacgactaccgccccggggtggtcaaccctttgaacccctgccttcggagagcgttccatgtctgaccgttatatcgacttcgccaactcaagcctcggccatcgcctggtcgccgcccttggcctgccgtcaccggtacgcctggaacgctggcaagccgggcgcctgcgcccggtcgaaggtgcactgttgctcggcggtggcgcgctgactgccaaggtgcaggcttttgcgcacaaactcaccgacgcggcctacagctacggcgccgaaaattcgacatggattcccggccacggccccaagctcaaggcggtggtgttcgacgccagtgagttgcagcacaccgaccagctcaagcaactgcgcgagttctttcagccgctgctgaaaaacctggataacagcgcgcacctggtgattctcggccgcgcaccggaaagcctcagcgacccgtatgccgccagtgcgcaacgtgccctggaaggtttcagccgctccctcgccaaagaattgcgcaatggcggcgtgctgcaactgctgtacgtcggcgacggcgctgaagatcagctggaaggtgcgctgcggtttttcctgtcgcccaaaagtgcctatatttcaggccaggttattcgccttgaggcctgcgcgacgcccgtcgaagattggacgcggcccctggccgggcgcaaggcactggtcaccggggcggcccgcggcatcggtgcgtccatcgccgaaaccctcgcccgtgatggcgccgaggtcatcctgctcgatgtgcctcaggccaaggccgacctcgaagcgcttgccgcgcgcctgggtgcccgcacggtggtgctggatatctgcgccgaagacgccgccacgcagttggtcgaacagctgccgggcggcctcgacattctggtgcacaacgccggtatcacccgcgacaaaacgttggccaacatgaccccggaatattgggatgcggtgctggcggtcaacctcaatgcaccgcaagtactgaccaaagccctgctcgacagcggcaccctgcacgacaacgcccgcgtggtgttgctggcctccatcagcggcatcgcgggcaaccgtgggcaaaccaactatgccgcgagcaaggccggcttgatcggtctggctcaggcctgggcgccgctgttgaaagcgcgtggcatcagcatcaacgccgtggccccaggctttatcgaaacccagatgaccgcgcatattccgttcgccttgcgtgaagccgggcgacgcatgagttcactcggccagggcggcctgccacaggacgtcgctgaagcggtggcgtggcttgggcaacctggcaccggtgccgtcagcggccaggcgctgcgtgtgtgtgggcaaagcctgctgggagcgtaagcatgaattggcaaacgttaggcagtacgccgtttctaccgccgctgtattggcgtgcggcgctcaaacgcaagatcaccggtaacacccttcccgaccagggattacgttgccaagtgagcgttaaccccaaggccgtggcggcctatcgcaaggtctgcggatttgccgacagccctatcctgccggcgacctatccgcacatcctggcgttcggcctgcaaatgcagttgctcaccgcaaacaacttcccgttcccgctgctcgggttgattcacctgagcaaccgtattcgcctccatcggcccatgggcgcggtcagtgacctgacggtggcggtgcacgcacaaaacctcaagccccacgccaagggtgcgacctttgatgtggtgaccaccgtcgaggattctctcggcctgctgtgggaagccgagagccgcatgctctgccggggcgtgaagctcgaaggcgaaccggtggatgaggccatgcccagccctacccaagtcagcgagctgacccgctggaaggctcccgccgatatcggccgtcgctacgctcgggtttccggcgattacaacccgatccacctgagcgcggtgaccgccaggttattcggtttccctcaggccatcgcccatggattgtggaacaaggcgcacaccttggcggcgttgagcgaacatctgcctgcagccaatctcgagatcagcgtcgaattcaaaaagccggtgcgcctgcccagtgaagtccatttactaaccagcgcccccggctccagtggcgagttactgttaacggggtcaggaaacattgaacacatggtaggcaagtggcaacccattgcctgaaaaacactgattaattgtatatatacaccctaagttatagcgggctttagttagcccgctatcttgttcaactccttgattttcagcgcatatatttcctggtacatcccccctcccccccgttggtattagtccctaagcagtgggctgcgcgcagtatataaatcgttaataccaagttgagattgtgagaaagagtgcctgggtctgtgatagccacacggacaaacgtatcgctatccctagaaataacgagcgtttgaaaacaacagacgttgtacaggtgcaagggaactccatcatgaaaactcaaactcaagtagtgctttggaaggcaagtaccgcgctggccctggtcatggcgatgagcctcggtggctgcagcagcggcggtggcggacatcacagcagcgtggcggcttcttcgcctgatgcgggcgccggggctggtggtggtaccggtggcggaaccggcggtggtaccggtggcggcactgacggcggtaccggtggtggcacaggcggcggaactggcggtggtaccggtggtggtaccggtggtggtaccggtggcggaactggcggaggtaccggtggcggcacaggtggcggcactggcggtggtaccggcggcggcacaggtggcggaaccggtggaggtaccggtggcggcacgggtggcggaaccggcggcggcactggcggcggcaccggttcgactactacacctctggtcaccggccaaatcgccggcaccctgggcactaccgttggcaacgttggcgcggctgtcggtgatctgggctctaccttgaacggcgtgcccattgtcggcgttaccgcaggcggcctggtcacctctaccggcaacgcggttaccagtatcggcacgggcgttaccaacggcttgggctcgctgggcactaacagcaactccttgggcatcactgtcgccggtgtaggcgatggcgttgccgacctgggcaccggcgtgtcgaacaccggaaaatccctgggaaccaccttgggcggcattccagtcgtaggcggcttgaccggcggtgtcggcggcgcagccggcggcctggtggacaaggttggccaaaccgtcaccatgctcggcgataccctcagcacggcgagcactaccggcccgctgggctcgctgaccaacaccgtgggcggcaaagtgctggtacctgtggtgtccctggtggaaaacaccaccggcaacctcggtaaagccactggcctgggcaacccggtgaatggcctgctggataaagtcggctccaccgtgaccggcttgggtggccaagtcgcaagcgctggcggtaccggcaacccggtgaccactcttgtcggcggcgcgttgaccggtgtcggtggcgtactcgacaagtctggcggttacgtagcgcctgccggtggtgcctcggcacctggtttgcctgaactggtaggtggcctggtcgccaacgtgggcaacggcctgaatgccggcaacaccaacggcaccgtcagtgcagcgggcgtaaccggcggcgcactgggcaataccgtcgcctccctcggcacagtcatcggcggcactggcgtggcgaacacggccgccactgctccggtagccggcctggcaaccaacgtcggcgcagccctcaatccagtgactagcggtgtttccagcctgacccaaaacatcggtaccaccaccgggctcggtgcgccggtcaatggcctggtgactcaagtcggcggcgccgtcagcggtctcggcaccaacctgaccgccgcgaacgccaaccccatcaccaacgcggtaggtactaccgtcaccgcagtcggcaacacggtaggctcggtgggtggcctggtcaccggtggcaccagcggcagtggtggcggcttgctcggcggcctgaccgtaggcgcaggcgccagtgccggagcttcggcaggcggtactgcaaccacgggtacaatcggtggtctgggcggtttgttgaacggcctgaccggcaaaaaatagaattgcacctggccgattagacggcctcccctacagcgcctacgcttggttgagacgagagacccttataagtctctcgtcttttttatgggctggcttttatcaaaaaggcttggtcctcccgaaccgagtcccagaacccggcgggcccgaaacgctgctgcagtttgaccatggagtgtcctatgcgcgtgttgacgccgttgttattgctcaccctcagtgcctacgttcaggccgagacccttcccagtttcctcaacagcaacgacaccattcgcaccctgccggtgcccaacctgccggccgacgcctaccgccccgtcacgccacagacccaggtaccggaagcctcgccgacccagggccaacctttgttgatggacaccaaagtcaccatccgcaagctgcagatcgagggcggcacggtctacccgctggacgaaacggccaaggcttacgcatcgttgattgggcatgagactaatctcgcgcaattgattgaagccacccgcagcatcacccgccgctaccaggatgacggctatctgttgtcctacgcattcctgccgcaacagaccttcgaaaacggcttggtgcgcgtggtactggtggagggttacatcaaggactatcaacagagcggcgacatcggctcggtctccgcctacgtcgacaaactggcaaacaaactgcttggcgaacgcccgctcacccgcaaaacgttcgagcgctataccacgttgatgggccgcatcccgggcgtgaccctgcaggcgcaagtaccgccgccgggcaccaccgacggcgccacgcacatggtcatccaggcgagccgcaaaccgttcaccacgagcatgagcctggtcgacgaaaaccgtggcggcctgcaagccttgctcaccgctaccagcaactcgcagacgtcgatgggtgagcaaatcaacgtcagcggcctgttcccgcccggcgacgacaaagagcattactaccgtgtcggctacagccagttcatcaacgccgagggcacccagttggccgtcggcgccgaacgttatcgtgccgaccccagaagcaacatccagctggacggcggctttgaactcaagccgcatcagtcgatcgaccgctacaccattggctttacccatcctttgattgcgtcacccaatgaatcgctgaccctgggtacacgcctgtatgcggtggaccaaaccacgcgctatcaactggttggctaccagccgcggttcgacatcaaaaccgatctgcgcgccttcgcgttcgagggcgactggcgcaagtccgatgcccgccaattacgcattctcagtgccggcctctaccaaggcatcaatggcctgggcgccagaacccacagcgacctgggcaccgcagaacctgatctggacttcttccgcctgcgcctctccggcgtgcagagcgacaagtttttcgataactggcaaggcgtgctgtcgggtgcgttctactggagcgacaacaccctgcccgacagtgagcgcgccacgtttggcgggcagaacttcgggcggggctacccggatgaccagggctcgggggacaagggctggggcgtggcgtatgaggtcaactacagcttcaaccgtgccggcaactgggtgaaagtcgtgcagccttacgtagtgctcgaccgtgccaaaacctggttcaacgaactgccggtcaaaggtaatgacatgtcatctgcggccgtgggcctgcgttttggcgacaacaagtactacaacatcgcactggaggccgccaagccgatgtcggacattgccctggacagttttaaccggcggccgcggtatacgttgagtttcagttaccagctgtaaacacgtcagaaatcgaatgtgggagcgggcttgcccgcgatagctggctgacagtcaacacagatgttgtctgccataccgctatcgcaggcaagccagctcccacatttggaccctgtgcttgatctggcttatgtgtattacaaaggggttttacgcaggggaaaaagactgttgagggtgtcgatcaaccgcaccagatagatgggtttgcgaaacagatccagcacctgcaagcgcagcatgtcgctcacatcgtccatctcggcatgccccgacatcacgatcaccggcaggtgttggcggtcggtatgttcgcgcaggcgtttgatcaatgagataccactctcctcgggcatacgcaggtcagtgatgaccagggcgatgtcggggttgagggtgagttcctgcaacgcaaaggttacggaggaggcggtaaaacaaacgaagccctcgttctccagcgattccgccagttcaacgagggcatcttcttcgtcgtccaccaacaggatttgttggcgaaaaggtgcagctgcagcattcatgggtactacctggtggtgccgatcaataacaagagtactcacagagtgccggttgacggtcaagtcggggtaatggcagtggttattttggtaaacaacgcactgatctgtggtgacagtgtagtcccggccgccagtatcaccagcgctacaatggcaacaagaatgaggtattcaatcgccgttgcgccgtcttttcgccggaatagcaactggagttgaacgtgaagtttcatcaacagatcaaggatcatgataacgctcctctggcgacttggcgcccggtcaacaagctactgcacagtcaacataccctcgcgccaatctatcagggagcaggcgtaatggcagtcgtgatcttggtaaaaaaggcggtgatctgaggcttcaaggtcgtcccggcggccagtatcaccaacgctacaatcgctacgagaatcagatactcaatcgccgtcgcgccttcttttcgatgaaaaagcagctgaagttgaacgtgaagttttatcaagaaatcaaggatcatcgtacttctcctcagacgccacagcgtcctgttcccggtgtcgcacaataattgcgttgtgccatctgagcattgtcaacaaaccctgcccccacaactgtaagaacggattaatcacaaagtagtggcctctttcctggcgccgtaaatccgtgttttcaaaggcggctgcttatgtaggaaagaaatctttctgtcagtaatggcattttgtcctagctgaactaccttcaaatagcgaaatagttagtgaaatgttcatagcagccaggttgcggaattagcctgttcggatcgacaggtttaggtgcaacaggaaaaggagagccgtcatgaacacgcgtctgagcatggtattggccggggtgttattggtcggcgcgctgtttgccgggtattggggcctggtactcagccgcgaacccgcgccggcgccaccgccgccgccacaggcggctcctgtcgaaaaagccgttgccgtggtggaagaccagacccgccaaccggtggtcgtgctggcccatgatgtcccgccctttgttgcgctgaatgccgccgaccttaccgtggaaaaactgcgcactgctccggcgggtagcatgaccagcgttgaccaggccatcggccgcacaccgtggcgggccctgaacgccggcacttggttaaatgaagaaagtttcaccccgggtggcccgctggcccggatgatccgcccggatgagcgcgccctcgccgtcgctgtcgatgaagtcattggcgcagccgggcaattgagcccgggcgactatgtagatgtgctgctgtacctgcgccaggacaccgccaacctcgaacaatcggcacaggtggtgattcccgccatgcgcctgctgagcgtcggcgatcaaatgggcctgaccaacgacggtactccggcgtccccgccagccatgaccgccgaagaaaaagcccaacgtcgcgcgccctcccgcaccgtggtgctggccgtgcccgagccgctgctcagccgcttgatgctggccacccaggccggcaccttgcgcctggccgtgcgcagcagcgatgaacgtttgctcagccattactgggccggtgagagcgatgcgccggccaaggtgcaaagcgccaaccgcgacctctaccagttcacccaactcgccttcgcccaagccccgaaaaaaattgtccagggcagcccacgccgcactggcgtcgaggtgatacgcggcaatcaagcaacccaacaaacgcccgactgaacaaggatgctgtgcatgagccgacgtttcgtaccggtgttcacgctgaaaatcgcctgtgccctgctgctctcgaacgtgtctgtgagcttggcgttggccgcccccggcaattgcgccggcctgggccaattgcccgccgcgttgtcggtgggcgaaggcttgcaacaggaactgcaatcgccggtagccattacgcgcctggcgattggcgatccgaaagtggcggatgtacacctcaatggcgaccgcggttttctgctgaccggcgtcgcctccggcaccaccagcttgatggtctggaccgcctgctcacccacgccacgccagagcatggtgttcgtcaagggcaaggccacgtcggcgctgaccagcctgtcactggccccggcggacgaccccacgctgcccagccaggtgcagaccgacatccgttttgtggaagtcagccgcaccaagctcaaggaagccagcaccaagattctggggatgggcaaaaactttttcgtcggcagccccaacctgctgttccccactcccagcaccttcaagctgccggtgagcgccgacaacttcaacattggtttcggcggcggccgcgtctcggccatgatcaacgccctggaaagcagcggctttgcctacaccctggcgcgcccgagcctggtggccatgagtgggcaaagcgcgacgttcctggccggtggcgaaatccccatcccggtgcccagcagcggcagcaacaccatctcgatcgaatacaaagagtttggcattcgcctgacactcacacccaccgtgatcgaccgcaaccggatctccctcaaagtggcgccggaagtcagcgagctggactacaccaatgcgctggtgattgagagcatcaaggtgcctgcgctgaccatccgccgtaccgacaccagcgtgtccttggccgatggcgaaagcttcgtgatcagcggcctgatcagcagcaacaacaccaccaacatcagcaagtttccgggcttgggtgacattccgattctgggcgcgttctttcgcgactccacgatcaaccgccaggacaaagagttgctgatgatcgtcacaccgcacctggtgcaaccgttggcggccaacgctcaactgccgtccttgccgggcgagaacttccgcaactacgaccccaactggtaccgcctatactttttggagaacggtaacttcgatcgactcaacgggttgtcacaatgagcgatagcctgagccagaccttcctggcaatcacccgcaacaccaccgacctggaatggctgcaaggcgcgctggcgccccttggccaggtggtcagcgccggcagcggtaccctcgatgaactgctcgcactggtcgacgtgaccttcgccaacctggtgtttgtcggccttgaccgcgagcacgtggtcgcccaaagcgcactgatcgaaggcgcgcttgaggccaagccaatgctggccatcgttgctctgggcgacggcatggacaaccagttggtactcaatgccatgcgcgccggcgcacgggattttgtcgcctatggctcgcgctccagcgaagtggccgggctggtacgccgcctgagcaaacgcttgccacaggtcaccaccaatacccaattgggcggcctcacggtgctgtatggcacgcaaagcaatgccgatggcgcgttgctggcaagccacttggcgctcgtggtgcagaagagtggtcagcaaaccctgctgctcgacctgggcctgccccggggcgacagcctggcgttgctggggctggaaagctcgttcaatttcggcgatgccctgcgccacctgcggcggctggacaccaccttgatcaacagcgcatttacctcggccgaagacggcttgcgcatcctcgcctacgcccccaatgacgagccgctggaacgcaccagcgccgctgagctgtacatgctgctcagcgccttgcgccagcacttccagcacatcgtggtgaaccttgccggccagccggacagcgaagccctgcgcacctttgtcagccactgcgacaagttattgtggtgcaccgaccagagtgtgctggactgccgtcgcaacctcgccgtgctgaaccagtggcgcgaaaaaggcatgaagctggagcacgccaaactgttggtagaccgctatatcaaaggctgcgcgcccgattccgatgcgttgagcaaaagctttggcctggaagtgatcgccgtattgccgctgagcccggaagtgcgcctgaacgcgaaaaaccagggccagaccctgttcaccctggcaccacgcgaaagcctgacccagggtctgaaaaccctcggcgagcgcttggcaaaacgttcggaaggcatgaaaaagccctcccacacctggtttgaacgtctgctgggaaccggcaaatgaacggcgaaaaactcttcggcgcgcccgcccgcggcgtcggtggcaacaccgaccacgacgggctgaaactggtgctgcatcgctacatcatcgatgccatcgaagagtcggggaagaacctgctggagggttcgcgccaactgctggcgcaatttgtcatcgacaaagtcgccgaatacatcaaccgcatgcacctggcgatttcccgctatgaaatggagcggctggccgaagaaatcgtcgacgaactgaccggtttcggcccgctggaagtgctgctgcgcgacccgtccgtgacggaaattttggtcaacggcccgcaccgggtatttatcgaacgtgacggtttgctgcaccagagtgacctgcgttttatcgattcgcaccacgtggagcgcgtgatgcaacgcatcctcgcgccactggggcggcgcctggatgagtcgtcgccgatggtcgatgcgcgcctgcccgatggcagccgggtcaacgcgatcatcccgccgattgcgctggacgggccgtgcctgtcgattcgaaagtttcgcaaggacatgctcaagagcagcgacctggtggccatgcagaccatcgaccagaacatcttcgacttcttccaggaagcggtgggcaagcgctgcaatatcctgatcagcggcggtaccggcaccggtaaaaccacactgctcaatatcctcagccaactgatcaacccgcacgaacgcctggtgaccatcgaagacgtagccgaactgcaactgggccacccgcacgtggtgcgcctggaaacccgcccgccgaatgccgagggccatggcgaggtcaaggccagcgacttgatccgcaacgccctgcggatgcgccccgaccgcatcatcctcggcgagatccgtggcgtggaagtgctcgatgtactgacggccatgaacaccggccacgacggttccatgagtaccgtgcacgccaacaacgccgccgacgccctgctgcgcctggaaaccctggtgggcttgaccggccgcgtggtggcggaaaaaaccctgcgccagatgatctgcgccgccctcgacgtggtgatccagctgacccgcctgccggacggccgccgttgcgtcagcgaagtggtcgaggtggtgggcatccgcgaagacgtgtacgtgaccaacaccctgtttcgccatgaccggcgcaccgggttcggcttcctgcgcgaggcggtcaaccccgccggcgagaaactgcgccgcgaaccggcctagccttgaaaggagcgcgaccatgaccggggccatcctgctgctcatctgcctgatcctgatcgggctgtcgatccgttcctttcagaatggcctgcgccgcgcccagaccgagcgcgtgctgggccgccttgccgaaggccagccgcaactcaccgaagaggccagccagtggagcggcgtggagcgcatgttcctgcgcgcaggcctgggcaaacccagcgacaacctggggttgtggctggcggtgtgggtgctgggcgtagtgctcggcctgctggtggccagctgggtgggcctgctggtgatgctggtgctgccgccgttgctgctgcgcctgtatatcgcttggcgctatcagcggcgcatcaaacgcatgattgaacaactgccgcagttgctcgaccacaccgtgcgcagcctcaaggccggacgcaccctggccgatgccgtgctgggcggcatcgaggtgatcgaggacccgctgaaacaagccatgggccgcgtgcagcgcaacgtgcaactgggcgtcagcctgcccgagtctgctcacgactttgcggagttctacgagcgcgacgagtttcgcctgttcgcgctgggtttgaaggtcaaccatcgctacggcggcaacgccagtgagctgttggaaaacctcatcaagatgatccgcgagcgcgagcaggccgcacgccagttgcgcgcgttgaccggggaaacccgggtcaccgcctatgtactgaccgccctgccgatctcgatggtgggctacttcctggcggtgaaccccgaatatttgatgaccatgtggaacgacggcacgggccgcatcctgctgttcgtggccatgggcatgcaggtgatgggctgtttcaccctgtggcgcatgtttcggagcgtatgagatgggaatcgccctgctgatcagcgctgtgttgttcctcgccgccctggggctggtggtggccaacctgatgaaacaccggcgcggccagcgcctggttgcccagcgcctgcaaggccagatgggccgcgaaaacacgttcggcacggtgatgcggcaattgggcaacagcccgatcgcgcaacggtcggtcagcctggataacgaaacccagttgctgctcaaccgggtcggctggcgcaagtccagccagcgctccatgtttgccgccttccagattggcacccccttgttgctgatggtggtggtgctggtgacccagcaaatactgtttcccaactccggctcgccgtggctggcgcccctgatcgcactgggtgtcggctacctgctgcccaaacgcatcctggccagtgccgccaaggcacgccagcaacagatctcccgcgaagtatcgaccttcattccactgctgcgaatcctgttcgaatccggcatggccgtcgaacaggcactgcgcgtgctgagcattgaagcgcagcgtttgctgccggccttgacccatgaattgcggctgatcctcacgcgggtggattccggcctggagttaagcgaagaactcggcaaaaccgccacgctgctcgccgtggatgagttcaccgacacctgcatcatcttgcagcaactggttcaacaaggcggcggcgcaatgaagtcgttgctgtcgctcaagcaattgctcgatgaccggcgcctgacgcgcatccaggagttcgtctccaagatgtcggcgaagatgtcggtggtgatgatggtgtttttgtttcccgccctgttgatcgtgctcggggggccagcgtttatcggcatcacccgggccctgagtaacctatgaggaatgcccgatgaaagccttgatagccggtttgagcctgttgctgctcgggggttgcgccaccaatggccaaacgccgtggggcgccctgacggcgggcggcagttgcccaaaacccggttccgagcaggagctggcactgaacctggccgacgaaatggccaacgatggcaagctgcacgccagcctggccaacctgcaaaacctgccatcgaatctgccgcaagttcgcctgcgccaggccaaagcttatcgactgctcgggcgcagcgaggctgagccgttgtaccgcagcttgatcggcacctgcatggccgccgaaggcgagcacggcctggggcagttggcgtcggccaagggcgacaacgggctggccatggcccacctgcaacgcgcggcgcgcctggcgccgaccgatgaaaagatccgcaatgatttgggcgtggtctacctcaatcaactgcgcatggaagatgcccgcttcgaattcatgactgccatggaactcaagcaaagcgaccccttggcggcaattaacctggtgacactgctgatctatcaggacaactggaaacaggccgcacaagtcgtgaatcaaataggcttgagccctgagcaagtcactgaagcccaggcccgggcggaaaaactcaaaggttcaagcccccctgtcgccaaggccaaagaccagatcgccacggtcagcgacgcacccggcaccccgaggaattgatgatgaaagcactttaccttgcaagcctggcggtgctggccttgccgctgaacgccatggccatcgagcctggcccctcgtcgccgcagcaatcgttgaccgaaagctggctgaccctgcagcccagcggcaaagcgtcgtcaaccacccaacagaaagccgccgccgccgagcgcgatcaagccaaccagcgctggctggaaagcttcaagcacccgattccagagtattttgaccagaaggtcggcgggaaaacccagggcagtaactgagaaattaatgtgggagctggcttgtgtgggagctggcttgcctgcgatacagacacctcggtccttcaaatacaccggggtgatgccatcgcaggcaagccagttcccacatttttggccgcaatcagtgcgccgtcacccgctggcgcagcgccgaattgttgggtgacaacgccagcgccaattgcgtgcggttatgcatgtgggtcaggcgcagcacctgggacacatacagcttcacggtgttctcggtaatgcccaattcgcaggcaatctgatagttggtctgccctttgcccaccaaccgcgcgacgtccagttgccggggtgaaagctggttgaagatcgccgggatttccagcgggcccacgtcctcggcagacacctcttcgccgtcctgcccgggcgggctgcggcgtactttgtcgaggtcctggtacaggtcgttgatcgactcggaaagaaactgcaacttttggttcaggttgcccagttgcaggtctttcttgcgctcttccagggcggcctcctggcgctgcaggccttcgagcaactcatcaaggttgatcggtttctgatagtagtccgcaattccggcgcgcaaggctttgatcacatcctgcttgtcagcgcggccggtcagcatgatcgcttcgaaggcgcgctttttacccgccactttttgcagggcctggaccaactcaatgccgtccatgtccggcatgtgcaggtcacacagcaccaggccgatctcggcgtcttcgctgaagcgcttcaacgcctgctggctggactcacacgggacgcaacggaagccgctgctttcaagaaactcacagagctcttccacgatcaggggctgatcatcgacaacgagcacttttactgcagaggtaagcttgttcacacgcgactccatgccctggaaagccaaaagattgacccattccctacgacgaatattcctgtacaacttcttattaaacgtagacctactttccgactatgtacatagcgttaatcacctcagacgattaatggatccaaaaccagacaactgcaaatcccaccagtaaaaacggggcaaagggcagtttttttgacgggtctggcgccaaaaaaaccatggcacttttaagtccttgactcataagtggccacagttttggcgcgagcaaaatccacagtaaattggcagccgcagccgcaataaatgcgcccagtagatactgagaattcgaaaccagtgcaaaagcggctagcagcttcacatcccccgcgcccaggcggccgagtgcgtaaccgggtaacgtcagcaacaacgacagacaaaatgccaaaagcccctcaccggccgtcgcgccgagccaagtcgtgcccgtgcacagcaggtaaatcaacgccaacaggagcacgccgagtgtcaggcgattggcgagcaaccgctgccgcacgtcctgcaccgcacacaccaccaaccacaccaaaacaactgcgccgtggatcactaaaaaacatcccttttcgctgaatgattctatgctgatatcaagtagtagccgtcagggtagacgcggtgatgaaaacaggcctccccggaaagcaaaaaggcacggcagcgattgagttcattggcgtgtttgtgatttttttcgccgtgttctacggcatggtcagctatagcctgccgctgctgctgatgcagtcgttcacccaagcgaccgccgaagccgtgcgccagagcgtggggctggaccccaccatgcccggctacaatgccgccgtacaaaacaccgccaaagcagcgatcgttcagcgtttgttttggattcccgccgcctataaattcgatgccgcgacgcaggtcactacgtcattcacacccgccggcttgttgtccgttcagatcaactacccctcagccaatctccaggcggtgatgccgtttattgtcttgcctggcatcggcgccgtgccgcgcttgccggtaacgctgcaagcccagtcgagcctgcaattttgacctccggcgacaaactcttcgggcgcctgctcggccgcagtggcgcgctggccatcgagcctgcggtgccgccgtgtgcgggcttgcacgtgcaactggatgcccagggccgcgtgctcgacgtcagcggcacgctgctctcgcaactggccaaacacgccccctcacctcaactgcacgaattgctctgcgcccatagcgtagtcgccgttgaaggcgtgcctgcggattggcaacgtcacagcctcgacctggacttccagggcatggccgggcaaaccctgcatacacgcggcacccttgaaacgcacgacaacggttggctgctgcacgcggtggacatcggcgacctgctcggcggccggcaactggccgagcaacgcgaacagaaccagcaactggcaagcctggtgagtgaacaactgcgcgtatgcagcctcagccgcctgcccgaggtgttcaacgaacagttgagcagcgtggcgcaacgctggcgcattccctgtgtggcgctggcgctgctggatcaggaagaccagggctggtcaatctacagccaatacgccaaccacgatgccccgctgttctggcacaccggccagcgcctcggcacctgcctggacagcctcgacggcaccaccccgctgagcctgaaagcgccttacgggcgtggtgaccacccgcgtttgcacagcgtattcggcaatgccgatggctttctcgtgccctatcgcgacggccagggcgtggctgcgtggttgttgtgcggcgcctacagcggccaaccccacactcgcgaccgcgactggctgaacctcgccgccgcgctcgccgcgcccttgctcagccgtttgcgcgaacaccgccaccaccagcaactcgaacgcctggaagccttgcaaggcctgctcggtaccggctggtgggagttgctgcccagcagcggcgaaatccagctcgccccccaattgatgcacaacctcgacccggaagacggcccgacccgccagccgctcgacacttggctgcacctgatccaccccgccgaccgccaggaactgcacagccgcctgcgagatttgcagacactcggtaaacccctgctcgccagcgtgcgcctgagccgtagcgacactacccaggcgccgatctggtaccgcgtgcaaggccaagtgctgggcgcgggcgaacagcgccgcagcatcggcttcatgctcgatatcagcgacatcaaaaaccagcaactggaagccgccgctgcgcacgcgcgcctggacaacctgatcgccagttcaccggcggtgatctatgtgcagcgctacctcaatggcgccctgcaaccggtgtttttcagcgacagcttgctgccgctgctcggccgcaccctcgccgaatgcacccacgacagcctggtgcaatgggtgcaccccgacgaccgcgatttgtacttccagcgcacccgccagttgctgcgcgaaggcagcacccgcagccggtaccgcgtgcaggacaaacacggcgattaccactggctgctcgacgaagccaagctgctgcgcgacgaccttggcgtaccggtggaggccgtcggtctgtggctggatgtcaccgacgcaacccaggccgcgcagcagatcaaggacagcgaagagcgctatcgcatcctggtggaagactccccggcgatgatctgccgctaccggccggacctgaccctgaccttcggcaacacgcctttggccaattatctggaatgcctgccgggacaattgcgcggggtgaacctgggggattggctgtcagccgaacagcgcgaggcgtttgtgcagcgcatcgggcaactgaccccggaatttccggtcagcactgccgaaatcagcctgcaactgccggggcgtgaacatgcctggtgggtgtggtcggaccgtggcgtcttcgatgaaaaaggcgccttgctggaagtgcaggccgtgggccgcgacaacaccgaagtgcgccgctcccagcagcaactgacccaaagcgcgaagatggccaccctcggcgaaatggccacgggcctggcccatgaaatcaatcaaccgctgaacgttatgcgcatggccatcgtcaatgtgctcaagcgcataggcaatggcgacgtgcaggtcgagtacctcaccgaaaaactccagcgcatcgacgcccaggtccagcgcgcggcgcgggtggtggaccatatgcgcgtgttcggccgccgctcggaagtcgaacagcaacccttcgacccggcgcaggccgtcgagggcaccttgtcgctgctcagcgagggcctgcgcggcaaaggcgtggacgtgcgcctgactcaagaagagatccccgtgcaggtcaaaggctatgtcgatcagcttgagcaagtgctgatcaacctgatggtcaatgcccgcgacgccctgctgggccagcgcgagaaaaacccggagctgcgcccatggattgccgtgcacaccgaacatgacagccgtcacgtacggatttgggtcgaagacaacggcggtggcattgacccacgcttgctggagcggatcttcgaaccgttcttcaccaccaagccgattggcgtgggcaccgggctgggcctttcggtgagctacggcattgtggaaaacatgggcgggcggctgagcgtcagcaacggcgaacatggcgcgcgcttttgcgtggaactgcccagggccaccgacgtttaaatcactagataggcttcgccgttctggccgcaggtcaggttggcgccgacgttcacattcgccaggctgatgcccaggctgttcaacaggttgttgaggatcgggttgagcaacgggctgaggaggttgtccacgaccggcgccacaatggcgctgacgctactgagcagcgacactgtattggcgatcaggctgcccagcggattgctccccaccggttgataagccgtgatgccaacgccattgagggtgccggacaaactactgatcacgttggtcgccggggtggccgcctgataagtcggcgccaggccgacattgggtggcgtggcgaacggcgacgtgctggaaaacacttgggtttgcacactgccggcgatcgggctttgcaccttgatcccgatgccaccggcggcaaacggcacccgggggtcgcatgagccgatcacgacgaccatatggcagagtttggtgccaatatcgaccagccgcagtgggtctacagtcatcggctgtgtgctggaaaatgcattgctaatagtgccgacattcagcgaagccagcgaggtggtggtggtcgttgtcaggctcttggtcccgctgccaccggttgggcagctatagcccgtgacataactgctggccccaccggcatccagcacgatattgagcggcaagttgcccggcaacaccagcagatccagctgctggcagcccgcgccgagcaagcacagcgccgagttgatcgtggtcaccaggttcaggctcagcagaccgttaaggaccggcgtcaacgggccgaccagattgttcactgccgtattcaaccccgacaaactgtttaacaccggcaaactgaccgtcacctcggtgcgcacctgggcggtccgcacgtagatcttgttcggccccaacgggctggccgccgccagagccgggttgccgatggccgacaactgtggaggctggatgactttgacctgggtggtgatattcgccaaccccagcaagttcaccggcaacgtcgccgatgccgcactctggctgttggatagctgcaccacaccttgaatcagctggaatagctgcacattggcattcagcgcggcagcggtggtgcccgtctgcaattgcaggatctggcccaccgtcaacggcgcctggttgatcgcggcgatttgcaggttgcccagtgcagtcagtacgtcggccgttgcgccgttggcggtcagcaccgtgacagccgcctgaatcagttgcgaggcggtgacgttggtgttgagcaattgggtgtagttgccggccgccacgttcaggttgatcgccaattggttgaggtagctgagcaggttgatattggtgttgatcaaaccgttccagccggccagcgtgaggttgacactgccgccgagcagcccggaaaacagcgggttcagcaggctggcactggcgctgtcgacgctggccagcgtgctgttgatcgtcagctgggccagggtgggcgcaggcatcgccgccaccgccgtcgcgctcaacaccgtgttcaaactgaccttgccgccggacaccagcgcccacaccccaccggcaaaactggtggtcacggttttgctcaccaccacttgaatcgccgtcgacaccgccgggttcgccgcaaatacccgccgccccgaagctgcggtggtgaccgcaccacaggtggtcaccaatgtattgccattgcccaccacaaaactgttgcgcgccacactctgcccggcataagccgccgccgttaacccggcgaggcaggtgccattgcggctgaccgcctccagcgcggccgtgtccgccacgccttgcagcttgcgtttttccaggtacaaccggccgctgtcgaccaccagcaaggtgcacatcaaaacaaacgccagcacgccaacggctaccaagccgatggcaccgcgttgcgtgtggtgaaagtggggagacatcgagcactcctgtgccggcgagttgccgagcgcttactctccttgggtatggatgagtgtagacaagggccgggaaggtcgcagattcaaaagtgaagacagaccaatgtgggagcgggcttgcccgcgatggcggtgaatcagtcaatcaatcagcgactgtcagaacgctatcgcgggcaagcccgctcccacaggggttttggggtgcttgttagtggggcgggtagttgctgaggattttggttacggtggtgcgaatggcggcgtcacggtcctgggggttgggcgagctggccatcatctgttcgtcactgccgcgccacaccagtttgccgtccttgccgtcaagcaggtcgatctggatggtcgccaccttgtaggtgatattgcgcgtttcgttgtacatcggcgcgccccagtagccattccacgggccgccccaggcgccgccgtagttggtggtgacttgctgctggcggtcttcgacgatcaggtaggcctgcacattcaggtcagccttggcgcctggcgctgcagggcgcaggccgcgctggtcgagctgttcacccacagcctggcggatgcgctgctcggtgaggtcactcttgattcgcgggtcatccgggcggtattgcagcgccgggtctttccaggcccagttgcggtaggcgccaaaatcgcggctggcatcaaagtcatggttgacctggctggtctggcagccgcccagcaatacaacaacagcaagtgcagcgatgcgacgaagcatggtgtttctccaaaaaggacgaaccgttctttagatgagaatagctgttaactgggcggataggccgtcatcgccttctgcatcgcctcgcgcaaggcgtcggccttttcactcaggctgccctggctggcggtttcggcgctggtgctccataccggctggcgggtgcggccgtcgaacaggctgatccgcgccacggcgaccgtcacttcataagtgcgcaccaccggcaccgtgttgtacatgccgtagccgttgccatagcggttatagccgccgccataaccgtagccatagtcgtcctggacctgacgcaggcgtttttccaggcgcacgtcggcgctgaccagcaggtcgggcgcacggttgtcatgcaacgggcgcaagccacgctggtccagcgcgccactgacggcttcggcaatttgcgccgagtccgcccaggccgaacctgccggcagttggccgtttaaccagccccaactgcggtaagcgccatagtcacgcaccggggccggataggcgctggcatcaaaggtattcgccgcctgggctggagccggcggtatcggggccgaggcggccacgtaaggattcggggtggaacaggcccccaaacccagggacaacaggatcaaacagagacgacgcatttcgacctccgcagactgggccgcttaaaccggacggcaaatccagtgcaaataacgcccaagtccggcaaagcttgggtgacgacggtgagcgagttccatctccaacaggtcctgtaaatcggcgcgggcctggaattccaccggcatatagtcgtggaacacccgcacgccactttggctttcgacctgccaaagcccctctagttgcgccgccagctcacgcgggtcgagcggttgttgcggcgtgaggctctgcttttcgccggccatgtcgttcttgcgcattttgcggaagtggcctttgagcaagttgcggtaaatcagcgcatcgcggttgtagaacgccagcgacaacaggccgccgggcaccgtgagctggtgcagcaccggcaggatcgcatggggttcagccagccattccagcacggcgtgacacagcaccaggtcgtaaggctcggtgagctggccgagcagatcctgccacggcgcatggataaatctggccgtctggccggcgtcggcaaagcgttggcgcgcgccttcaagcatcggttcggcgggctcggccagggtcacctgatggccctgctcggccagccacagcgacatgtgcccaaggcccgcgccgatatccagcacgcgcaacgggcgtttcggcaatgcttcggtcaggtcggcctgcagcacggccaggcgaatcgcgcccttggcaccgccgtagattttctcggcaaaacgcgtggccaactggtcgaaatgacgatcactcatgggcaaaccgccgctcgctgtcggccaacttggcgcgtaccacttcgttcatgtccagccccagctcgctgcacagcaacagcaggtacaacacgatgtcgccaacctcctgcccggcgtgggccagtttgtcggcaggcaactgccgcgactggtcttcggtcagccattggaagatttccaccagctcggccatttccacactggcggccatggccaggtttttcgggctgtggaacggcttccagtcgttggtatcgcggatgcggtgcaggcgttcggtgaggtgttcgaggttcatgcgggggctcctgaaggtgtatagcttcggggggatcaggcttgaaggcaagtgaacctttaggccgccatcgcgggcaagcccgctcccacacgttgatgtgtgactacctgaaaatgtgggagctgcggtgcgacgattcgacttgcccgcgatagcggtctaatcaacaacgctgaactccagccgtgccgtttgaccagcctcatccaatacactcagctggtaacgccccagccgctcaaagctggcattgatgaaatcctgattggcactgtcacccaacggtgcgccgttgaggaaccaccagcgccgaccactgccgcccaacgcggagagtttcaggcgcagcatctgctggctgccagcgggcaggcgaagctggtcgccttcgcgtacgccgacaatggataacgacgaggcagccgccaacgcgggcggcgggcagtccgggtcggcgggcgggatccgtgcttcacggcgctcgacccttggcaaccagggttccagcggcgcgggccacagggcgatgtttctggagatcgcgcccgggcagtgagcgtcaacccgcaagcctttggcattgacccacacgttttccatcaaccctacactcaaaggttgatccaatgcctgcagggtcggtggcgtggtgttatccagcgtccaggcaaagcgctggcgacggcaattgggatcgctgcggttcatgggttggcccagcggccaacagatcgccgccacacccacattggccggcaccggcttgacgggcgcgctgataccacgctggctgtcgcggttggtcaacacgtcgtgcacctgcagcatcagcggcgccgccgaggccaggccgaactgcccaggcaccggcgtgccatccgggcggccaatccacacgccgatcaaatatcgcggccccacgccaatcgcccaggcatcgcgaaagccataactggtgccggttttccaggccagcaccgggcgctgcacgagttcggcacgcgggtcgcggtcgggccgggcctggccgctcagaatacgccgcacaatccaggcggcccctggcgacagcaatggccgttccctgagcgtatcgtccggctgcaagcggatcgtggcactcctgccgcctcgagcgaaggcgctgtagccgctgagcaagtcttcgagacggctgccggcaccgcccagaatcaatgccagattgggctcggccagcgccggcaacgccaagggcacgccgccgatacgcatctgcgcggcaaaccgcttcggcccgtaagcctccagcaactgcaccgcgggcaagttgagcgaactggacagcgccgtactcgccggcaccgcgccggtaaaacccatcgagaagttgcccggccggtaatcgccatagcgccggggcacgtcctgcaacagggattcggagtgaatcagcccgtcgtccagcgccatcccgtagagaaaaggcttcaacgtagagcccggtgaccgcagcgcgctgatcatgtccacgtggccaaagcgcttggcgtcattgatatccaccgaaccgaggtaggcgcgtacagccatggtctcctcctcaaccaccagaatggcggcggaggtgtgctccggcaggcgtgcgcgccagcccagcaacaagtcttcgagacggcgttgcagggtggcgtccaccgtcgtacggatcaagggcgggctgtctggccggttcaaacggcgggcgagcaagggcgcgaggctcggctccaggcgcggcgcgagcagcagcggttcttccagcgcttcatcgacagccgattgcggccacacctgaaactcggcgaggcggcgcagcaccttgtcgcgcgcttcctgggcatgttgcggatgtcggtccgggcgcaagcggctcggcccttggggcaatactgcgagcaaggcagcttcggcgtgagtcagctgtgccggggatttgcccaggtaggcccaactggccgccgccacaccctgcagcgtgccaccgaatggcgcgcggttgaggtacaaattgagtatttcttctttggacaggtgccactccagctgcgcggtgcgccacagctgacgcagcttgccgtggagggtgcgcgagtgtggatccagcaagcgcgccacctgcatcgacaacgtgctgccgcccgacaccacccgcgcgcccgtgaggttctgccacgtcgcccgcaccagcgccagcgggttcacgccgggatgctgatagaaccagcggtcttcgtaggtgagcagcgcgtcgaggtaatacggcgagacttcgctcgtttgaatggggtagcgccacacgccattggcatcggcaaaccgccagaggggggtgccgtcttcggcgaggacaacgcgagccaaatcatccttgggcaacggcaatggccagatccgatcagccaaccacagcaggacaatgatcaacaccacaatgctcaaggcccaccgcaatatgtgtaggagcgggcttgctcgcgaatgcggcgggtcagtcaatggatggggcactggcacaccgcattcgcgagcaagcccactcccacatttaaccgagtacatccgtaaataatgaaacccatgtttaactctatgcttacagggaactagcctgcgttatcgacaaccaaaggcaaacacacgcccaccttctcatcaggacacacacatgcaggtagaaagctttttcgaatggttgggccaggcgctcggttcggtcatccgctttatcgtcgacgggctcagcgggctgttcggtgccttgacccatgccggtggcaactttgtcgaaggtttgtcgcgtacgctgggcatggacacctcgattatcagcatcctcacgctgatcgttggcttgctgttcctgtattcggcagtgcgggcgtttatgcgagcgtcgatcatcttcgggattatctggctgatgctggggttgtggttgctgagctgggttgttcactaattcgcccctgtgggagcgggcttgcccgcgatagcgatgtatctatcaaagatgcatcaactgacagatagctatcgcagcgacccgacgagccagctcccattccaagtcaagctatcagcggcccttgatcatcaggtccgccggagtttcccccaccgcctgccagttcggccggtacatcgactccacctgcggcggcggcacgcggtaagtccccggcgtcacagcccgcgccaggtacaacaggtgcgtggtacccgagccatccaggttcattgccgccacataacggtcatcacgaaactcctgatgcttgagcgacgcgttctgcatcgactctcgccactccttcacctggctgctggcgttttccaggctggccgcgctttgtgccaggttctggttttccagctccaggcctgcgggcagcaggtccaccaccagggcatccggcacgcgctgcttggcgcttaccgccagatgcaccagcaccagatcgccactgttgaggttacgcaggttcagcggttggccgttcatgcccaggtattcgcggcggatgctcaggttgtcgccacccggcgccggtggcacctgtggataacccgagattgtcagttgctgatacaccggcgcgtcgccctgattgctcaaggtcaagtcgctggacaacagtttgccctccagctccagcgtcgagtgctgattgttcaacgcctgcgccccgccactgccggtcagcgacacctgccaattcgtctcaggctgtgagaacccgaggcgcccggccagaaacagtgaattgcgctcctgagtcgacaagtacgggctggcggccaactgatccgacagcgtaaacaaacgctcttcgcgcttgcctttggccaggtcgttttcttcgagcaacgccaggatcatggcctgatcgcgcagcgggctgccgtagtcggccagccactcattggcattgcgctgcgccgccaacccggcgagcaaggcttgatcagcgcgtggctgatcgcccattttttgcaaggcaatggacagttgcaccaacggcaacccggaacgcgcatcgctgcggcgttcgaagaggctgcgcagcgagcccaacggcgcctgctgactgcgcgccagcaccatgccggcgtaagcttgcacggcaaagcgggtgtggtcggcgttatcgctgtaatccacttcgatcaggttgcgttcctgcacataccgcagcaggcgctcgctggctttcttcaacgcttcgggtggcacggcaaaaccttgatcgcgggcgcgcagcaggaagtcggttacataagccgtcagccaatattcctcttcgccatcggcgccccacaaaccaaaactaccgttgtagcgttgcatgcccagcagacgttcgatgcccagctcgatcttgcgtttgcgctctttgtcggactcgcccttgacgcccaggcgcttgagcaacacatcatcggcgtagagcgacggatacaaaccgctggccgtctgctccaggcaaccatagggataagccttgagcgcgctgatctgcgcaccaaggttcagcggaggccggctcgacaagctcaacagcgcctcgcgccccgaggcatcgaactgatccagcgtgccggctggcaagctccatggctgctccttgagtacggcacggtaatgcttgagcagcgccggataggccgggcgcacacccaacgtccattcgcggctgaacggcggcaggttttcacccggcaggtcgaggccattcactgtgacgttgaccttaccctggcccagcccaccccaggccttcaccggaatacgcaacgtggtgcgctggccttgcctgagttcaacggtttgcgtccccgcgttgaccaattccaactgcccttcggcagtcagttgcacatcgagcttctgcgccttgccagacaggttcgacaggtccagcgccaacgtcgtctggtcaccaccggcgaggaagcgcggcgccgacagttcggcgatcaacggcgcagcaatcaccgtcttcgcttcggccatgccatagcggtcatcgctccaggcctgggccatcaggcgcagctcgccattgaagtcgggaatattgacgctgacttcgccctcgccctgttcattcagggtgaccggcgcactttgcagggcgacgatggttacgctggtgtcggggcgcttgccgcccttggccagcgccgcatcaccgccgaaggccaggctggccaaacggccttgtccggcttcgatcaactggccataaatgtcgaactggtcgaccccataggccttgcggccaaacaggctggtgtacggatccggcgtcgggtattcagtgatattgaggatgcccacgtccaccgccgccaccagcacatgcacttgtttcggcacgctgccgtcggcatttttcgccgagaccttcaccgtcagcggctgtttggggcgcattttttccggcgcagtgagggtcacgccgagtttgcgctgggtgcgatccagaggcaggtgcaacaggccgaccgcgcgtttgggggtgatgttggctttacgttcgccagggcgaatcaccagggcgctgacgtacaggtcatggcgcgaccatttcgggtcgagcttcacagcaaagcttttgccctcggccggtacgtcgatttcctgccaccacagcggcccttcggcggactccaccagcaggtaacctttgcctgcggcaggcggagtcacggtgacgttggcggtatcgccgtcgccatacgcgggtttatccagcgccagcttcacctgatccggacgcacagcgccgccttcggtgttgtcctgcgcctggtagcccgcccagaaacgcaggctgctgaccaacccggtctgcgggtcttcgacttcaacacggtacgggccccactccacctggaagctgaccttcgcggtgtcgccggccttgatgttcagggtctgctcgtcgaggttgaggaatttctcgttgaagtggtaactccagccatcgctctcggagtagttccagtagtagtcacggcgctcacgcaccaggcgcaccttgaggttttgcgcggcaagtttttgcccgacctggttggccaccaacacttcgaattccgccgggccgtcaccgttggtttccttgccatcaaacaggccacgcaggcccggcagttgctcggctggccagatcggctgcaccaggcgccgggtgatcggccgcccgcccgactcttgcaaactggcctgtacgatcagttgcagcggcgacttggcatcggcccatttgctttccagggtcagcgcttcctgccccttggcgtcgagtacgctctcgtccagctcgaaatcctggctcaactcttcctcggtgaccgaaccgaactggtagccgggcaacgatttgacggcttcgcgcaggggccgcacatagacttgcccgctgacccgattgcccgaggccggcgcgccatacagatagcgaccgttgacctgaatcaccgggttatccgccgggctcagcgccgtgtcactgcctttgagctccagtgccaggcgctcgggcaggaagtcttcaaccaggaactcatacagctgcggcttgccgtcgccgaggtcgaacaccaactgccagcggccggtcggcgcttcgccggccagttgtaactggtattgatagaggccggacgcatcggcatcccacacgaatttgcggctgacctgttcatccgggcggcgcacttcgacgctcaccggctgtggcttgaccgcctggccgtccttgtcccgcagcaaggcgttgagcagcacggtttcgcctgggcgatacaggtcgcgcggaccgaaaacaaagaactgcaacgggtgagagggctggccgccaatatcgaactcggccaggtccagtgcagcactgtcgagacgcagcaggctggtttgctcgccttgtttggccaacaacacctgggcttttttcggcagcggcaactcggcatgtccgcccttctcggttttgccctgaccgagcacgcggccttcggcgtcaagcacttcaaggtcgacgccgtccagcgccttgccgccttccagtgcctgggtaaagacgtccaggcgattggcgtagcggtgcaccgacagcccgatatcactcaaggtaaacagcgtggccggttgcgaatagttgtaggtgcccgaggcgcgcatcaccgccaggtacacgcccggctgttgcaattgcttgaggcccgcaatcggcagcaacagggtttcacgggtgttgcgggcagggttcaggtcgaagcggccgccgtagaccagatcggccatgggcagcagctcgcgggactcatagctttgcaggctggtgttgcggccccattgggccaggaacgagggcaaggattcaggcttgatacggaagaactcgacgtcaatcttgtcgacgttcagtgcgattaccggcaggccttcggccaatcgtgtcggcagcagggtgccacggctggcgaaaccgacagtggcttgcaggtcgcgggtttccaggcgggcgctgtactcggcggcgagcgtgttgtcgttgaccgccttcacgccggcatcgaccgtcagcaccagtttgcgctgcggctccagatggcgcaggcgcagctccatcaggttatcggaaatttcccaggcgccatcgaccttgccggatttgctgtcgaccaggtgcagtttgtcggcgaacttctgctcgggatccaacgggatggaaaagctcacggagagtgtgctggccccgtcgagttgcacttcggacacatccaccacgttcaactcacgcccggcgtaacgctgcttcagcgccgccacgtccactgccgctttcgcaggtttgggggaaaccgctgtcgcggctggcggggttggcgcagcgggtttgtcggaggagtcgcaggcgctcagcagggccagcgcacaagccaggaacagtcctttgttaagcatgaggcactcttatggagaggggtccgaggggtgaactatatatcagctcgaagggggccgatgtggtgctggtcacattgaccgacggagggtggtttggttctttacaagacgtaaggccaggccaaatcccacacacaatgaagactcctgtgggagctggcttgcctgcgatcgcggtgggccaggcagaaaactttacactgatgcaccgccttcgcgggcaagcccggctcccacattggctctgcgtagagcctgagggccagttacaatgccactcccccaaggagcccgcatgcccaccttactgaccgactggcgccaccgctccacccatcgccgcgtctgggccctggccgcgccgatgatcctgtcgaatatctcggtgccattggtggccttggtcgacagcatggtcatcggccacctgcctcacgcccaccagttgggcgccgtggccgtcggcgcgagcctgtataccttcctcgcctgggccatgggttttctgcgcatgggctccaccggtttcgccgcccaggctgccgggcgtaacgatggcgcggcattgcggcaaatcctgttgcagggtttgttgctcgcgctggggctggcgatgctgctcggcacggtgggcatccccttgagccatctggccctggaatggatgcagccgtcccccgaactgaatcaactgacacaagactttttccacacgcgtttgtttggcttgcccgccgcactcgccagctatgcgctggtcggctggttcctcggtacgcaaaacgcccgcgcgccgctggcgattttgctgacgacgaaccttgtgaatatcgccctgaacctgtggttcgtgcttggcctggattggggcgtggtcggttcggcccgcgcctccgtcgtggccgaatggaccggcgccctgctcggcctggccctgacgcaaaaagccctgcgcgcctaccccgggcacattgcctgggccgccttgaaatgttgggaaagctggcgcccgctgttggcggtcaaccgcgacatttttatccgcagcctggcgctgcaatcggtgtttttcatgatcacggtacaaggcgcacgcctgggagacgccaccgtggcggccaacgccttgctgctcaacggtctgctgctgaccgcccatgcgctggacggtctggcccacgccgtcgaagccctgtgcggccatgccatcggcgcccatgaccgccagtcgctgcgtcgttcgttggtggtggcgggcggttggtcgctgattgccagtattggcttcgccctgctgttcaccgtcgcggggcacctgttcatcgctatgcaaaccgatatccccagcgtgcgcgaaaccgccgatatctacctgccttatctggcggtactcccgttgattgcggtgtggagctacctgctcgacggcctgttcatcggcgccacccgcgcccgggaaatgcgcaacggcatgctgctgaccgtgctgctgaccgtgccggttgcctgggccttgcagggtctgggcaaccacgggctgtggctgaccttcctgttgttcatggccctgcgcagccttactttgtgggcgattgcctggcgcttgaaccggcaggatcagtggcttggataaaagcggttacgcggtccagcaccggcgcgagccaacgtagcggcttggcgatagacgccaccagcgtcgcgtggttggtcctggtgaaatagaacgcttcgaccggcacgcccgccgtgcgcaacttgctcgccagccctccggtattgcgcgtggggttgaccaggttgtcgtccttcgaagcgatcaacaggctgggcggcgcactggcgctgacgtggttgatcggctgcgagtccggtggcgagtcggggaagaaaaacaccgggcgcacgtcgcggttttcaatcggcaggaagtcgtacggcccggccaggccaatccagcccttgaagattgacggcgacaaacccaccgcgttcagccagcgcgaatccagtgccagcatcgacgcgttatacgcgccggagctgtggcccatcacatacatctgcacggggtcggcgccgtagtcggcgatgtgctcgtgcgcccaggccacggctttggcaccgtcctggagaaaagcggggtaacgcacttgagggtagagccggtaatcagcgatcaccaccacaatgccgcgcgaggccagggcttcgccaacgaaaccgtagtcatctttggagccgctgttccagctgccgccgtagaaaaacaccacgaccggggcgttggacacggccgggacggggcggtagacgtcgagtttctggcgggggtcatcgccataagcgatggcggaggttttggtgaaggtgctggagggagtgagtgcgttgagtactttgatcggggaacaagccgcgaggaacgcggcgagtgccagggtgaacgcttgcaggagtttgctcgacatcgcccagccctcacatagaagctactgccaaacgaagatccaacggtgggagctggcttgcctgcgatggcggtgtgtcaggcaaaaaactctgcactgatacaccgctatcgcgggcaagcccgctcccacaggggattgtcgtcaatacaacttacgaggacaggtaagacgagcgcgtcaggcccaggcgcaatgcatccaggaactgggtgcgctcgctggcactgatcttcgcgctcgcacacttgtcacggtagtgcgtcatcaactcctccggcgacaagtgcacgtaacgcagcatgtcttcgatggtgtcgtgggtttcgatgccggcgctgtacaccgaaccgtcttcacgctggtagatgttcaccgagtcggtgtcaccaaacaggttgtgcatgtcacccagaatttcctggtaggcaccgaccaggaagatacccagcaagtagtcctcgccctcgttcaaggcgtgcaccggcaggctggtctcgatggactgctcgtcgacgtactgcttgatcttgccgtcggagtcgcaggtcaaatcctgcaatacggcgcggcgcagcggctcttcatccaggcgatgcagcggcaggatcggcaggacctggccgatggcccaggtgtccggcaggctctggaacaccgagaagttgcagatgtacttgtcggcaagcttgtcgttgagttcgtccagcacctggcggtgcgagcgctgacgggccttgagcgagtcgtgcaggcggcggcatacggcgaagtagcactgctcggccagggctttttcagccagggtgatcttgccgtcggcgtactgggtggccacgtcgctcatgtagtgagtggcgcgccagtaggtttcggtgaccatttcaatgtcggtcgggcccagcaggtccaccagccattgcacggtttccggcaggctttccttgttttcgatcagcgggatttcgtcgttgtgtttctcgacgtcagtcacctgcaccaccagcatggcgtggtgggcggtcagggaacggccgctttcggagaaaatgttcgggtgcggcaggctctgcgcgtcgcagaactccttgagcatacccacgaccacaccggcgtagtcgtccatgtcgtagttgatagaactggcgttacgcgagtgcgtgccgtcgtagtccacacccaggccgccgccgacgtcgatgtggtcgaccggcaggccaaggttgcgcagttcgccgtaataacgaatggcttccttgaaaccgtgctggtagtcggccaggttggcgatctgcgaacccatgtggaagtgcagcaggcgaatgccctgatccaggcccgccgcgcggaagcgctcgaccacggacagcagttgcgccgccgagagaccgaacttggacttctcgccgccggtgtccgcccacttgctcgaggccagggacgacaagcgcacccgcaggccaacctgcggcttgaccttgaggctggcggcttcttcgatcaccagttcaacttcggattctttctcgatcacgatgaacacgttgtgacccagcttctgacccatcagggccaggcgaatgaactcgcggtccttgtaaccgttgcagacgatggtgccacccttcggggccagggccagcacggccagcaactcaggcttggaaccggcttccaggccgatggacacgttctgggtggcgatgatgttctcgatcaccgcctcctgctggttcaccttgatcgggtacagcgcggtgtatttgctctgatattccaggcgctcgatgttcgaatcgaaggcaccggtcaattggcgtacacggtcttgcaggatatcggggaagcgcaccagcaacggcagcgacaggccgctcttgcgcagttcgtcgacttgctcgtaaaggtcgacaggcgtgctgttcgggccgttcggacggacttcaacgcgaccggcatcattgatcgcgaaatacccggccccccaatggcgaatcccgtaaacactgcggctgtccgcaactgtccattggctgccatcgtctttgcgtgtgcgtcgtacggacatcgaagtcccctataaatgaagtcgaaggcaccgcccctatcagaggctggcgcagtctaaagaatgaaaatgacgatttgcctgcgtgaaaggtaggaccccactcgcaggacagagtttagacacaggtcgggaagaggctttcagccgccggacttcttggccttgtacccgagcttgatcagctcggccaacagcagctcgacgtgatcgccctggatctcgatgacgccgtctttcaacgcgccaccggtgccacaacgctttttcaacgtggtggccagttctttcagggcttcctcggccagcggaacgccggtgatggtggtcaccgtcttgccgccacggcctttgctctcgcgtcgcacgcgggcaataccgtcgccttcagggatcagggtctgtttacaggtacacgaatccacaggctgacgacagtccgggcagtgtcgacctgcgtcggtggaaaataccaggccaccaagggcggcgaaggatgcggcttttttggccaccggcaatcctcttgggaggacaaagactgatcggtactcacaatgagggttaccgaccgcgaagccccactcaggcaggggcagcgctaccgaaccaaccgactcctaacagcagggtggttcgggtgaaaagtcgcgcagtgtaacggcaaaaagccgacttgctaagggccaaatggcgccaatttatgcagctttagcgacgtgaggccagatagcgccgcaagccctcttgcgcgtccgggcagtagggcttttgttcagcttcctgcaggacaatttcaaggggtaaaaagcgcgcttccatgacttcttcgggttgcagccgcagggggccgtcccagacggccgagtaggatttgcaccagagtttgctgtcgccatcttcaaagtagaaatggtcgtgctcgaccaattccacgccgctgacgcccaactcctcttcgagctcccgggcagccgacaacgtgtaggactcactcgccgcgaccatcccgcccgccgccgtgtcccagaaacccgggtacatggccttgctcagggtgcgccggtgcacgcagagctcgccggcggagttgaacaaaaagataaaggtgcaacggccaatcaggccgcgctggcgaaggtcggacctgaccagggcgccgagcaggttgtctcgctcgtcgacccagcagatcagttcagcatcggaagccgcgcggtgggcggcctccttttgagtagcgtccatcatcacccctggttgaggagctgacgcaaatcgataacggcagcgtttgcccgggaaatataattggccatgaccagcgagtggttggcgaggatgccaaagccactgccgttaagaatcatagggctccaaaccggttcctgcgaagcttccagctcacgaatgatctggcgcacgctgacggtggcgtttttcttggccagcacgtcggcaaaatcgacctcgatggcgcgcagcaagtgggacaaggcccacgcctggccacgggcttcgtagaacacgttgtcgatctgcatccatggggtttccaccacttcctcatcgacctgcggcacttcgcccggcgccagggcttcggttttcagcgcggtgttcagcttgacccggccgacgctggccgacaggcgttgcgacagcgaacccagccgggtagccacatcacccagccagttgttcaggttgtcggcacgcgcatagaacagcgcgccgcgttggttcgggtcggacaggcgcgcttcgtagcggctcagggagttgatgccttcctggtattccgattcgctggacggcagcacccagctcttgttgtcaaagttgaaacgcggctctgccttggccaggtccgcatcttcagccgactgcgattgggaacgagcgaagtctttacgcagggcacgggtcaagtcgcgcacctgcaccagcacgccgtactcccagctcggcatgttgtccatccacaggcctggcgggaaacggtcgttggaaatgtagccgccgggtttgttcagcaatgtgccgaccacggtcttgagggtttcgacggtggtgaagcccaccaccatctgcttgccgtccttttctgcggcaagctgggcattttgctggaccgggaacaatgccggctcttcgctccagtaccagccgaggccgccggtgaccaacaggtacaaacccagcaagctgagcacggcgcggctcatcagcaggttgcgaaagtagccgcggttggccgacttgggctcaggggcagggcctttggcgctgcctgcacggtttttccagtccagcatggcgatatcctttcaatcacttgagttcatgcacgtcaatggtccgggtgcgttcaaacactccgaccacaaccctaccccatcgtgcccgtggatgcggggcttttaaccgaaagtggcaggtgcgcgaggttcaactataaaggatgcacgttttttacgctgcgcgaccaataggtcggtaactgaatgctcaagacccgtacttaattgacgtatgacactcatgtaatggaaaagaggtgctagcatagagccatcagtcgacctcagcatgcgccctcactagtagtcaggatatgaccgagccagaagaccccagccgtgagcgtctcaagcaccattttgcccagcgggtaattcatcaggcacgtcaaattcttgagatctggcagcgcctgcaacgcagcgaatggtcgaacgccgatttgtccgaactcagcgaggccaacctgcgcctgctgcgctttgccgaacgtttcgagcaaccggagcacggccagttggcacggcatatcggcgaatccctcaaggctgtggacgacaatcgcggccgcctgagcagccagctgatcaccgaactcaaccgcctgatgcagcgcttgtcccgcaccggcctgcgccagggcgaccagttggaacagaccttcctgccgccgatgcgcaagccgatctacgtgatgctggccgatcacgaccgtgccgaacgcctggccaagcaacttgaattcttcggcctgagcgcccagtccctggacagcgtggcagcgtttcgcgcctccatggccgagcgcctgccgtcggcgattgtgatggacgtggatttttgcggcaccggcctgggcctcaaactcgccgccgaggcccaggaaggtctggagcaaaagctgccgctgctgtttttcagcctgcacgaaaccgatacgcccacccgcctcgccgccgtgcgcgcgggaggccaggaattcctcaccggcacactggaagcctccagcctgctggaaaaaatcgaagtgctgacctgcgtcgcccagtacgaaccttataaagtgctgatcattgacgactcgcgggctcaggcgttgcacaccgaacgcctgctcaacagtgccggcatcgttacccgcaccttgatcgagccgatccaggccatggccgagctggcggatttccagccggacctgatcatcctcgacatgtacatgccagcctgtaccggtaccgaactggccaaggtgattcgccacaacgaccggtatgtcagcgtgccgatcatctacctgtcagccgaggacgacctggataaacagctcgacgccatgagcgaaggcggcgacgacttcctcaccaagccgatcaagccgcgccacctgatcaccaccgtgcgcaaccgtgccgcccgggcgcgcaacctgaaggcgcgcatggtccgcgacagcctgaccggcctgtacaaccacacccatatcctgcaattgctcgaagactgcagcttccgcgcgcgccgcgagaacaagccgctgagctttgccatgctcgacatcgaccacttcaagcgggtcaacgacagccacggccaccccatgggcgaccgcgtaatcaagagcctggcgttgtttcttaagcaacgtttgcgcaagaccgactttatcgggcgctacggcggcgaagagttcgccatcgtgatgcccgacaccgacctggaatcggcctgcaaggtgctggacgaaattcgcgggcgttttgccgaaatccactaccccgcccaaccccaggatttgtggtgcaccttcagcgccgggctggtcgagctgtgcgaaggttccgacagcctgatgatggctgcccaggccgacgaggcgctgtatcgcgccaaggacgccgggcgcaaccgcgtacaagcggcgcgcacgtcaaagcaaagtgccatcttttcaccggaatccagcgattccgtcataactctgtaatggaaacgcaataacttcaggcacttatcttttgctgtcggttgaaaccacgcatgcgcctgaagctgctgaccaatctcaataccctccttctggtggccgtgtgcctggcacttggggcgacgctgtggtggtcgcaacgggcgctggaacggccttatttgctgatggagcgttacctcgggctatcgcagactttccaaaaccaggccgcacgcaatatcgacgactacctgggcagtggcgacgctttgcgcttgagcagtgccagccagagcctggaaagcctgttgcaacatctggatgaactgcccgccgacctcgcgcaaaacctgcgcccgagcctgaccgaactggatgctttcagcaaaaccgacctgctggccgccggcaagctggctggcgacccgcaagccttgttgctgcaagccgagcgcgaactgggggcgaacctggaacaactgagccagtacgcaatgggcgtcaattcgccggatgccgcgcgttacttgccacccctgctggcagcggcccaacatctaggcaagctgtcactggcccgcgacaagctggtaagcagcggccgcgcagaattggctgacgatgtagagcgcgaaatcgccagcatccgtacccaggccgacgtgttggcacagttgccattgctcggtgtgaaggccagcagcgaatccagcaccgatgacttttccgcgatgatgggcctggaaaacagcgaaaaaaccgaagtacaagacactggcgtcgacctcaagcgcgagctcaacagcctgctgacccgctacccggccgaactcaagcgcacccgcgaccagatccagcaacgcgccgacctcgccaccggcacccacctgaaaatcgccgccgtgcagcaagccatcgccggccttgagccggtggtgcgcgcgcaacacggcaagatccagggcgaagtgcgcctgatgcagggcgtgatgatcggcctgattttgttgatcgcgctgctgatcgacaccctgcaacgccgcctggcgcgggtgctgaccaacctcgcaccggctctgtcgacctgggccgagggtgatttcagccagccgattgccctgggcaagaccaaccgcgaactgcacgatattgaagcttcgttgaaccgcctgcgcgcgtatctggtggacctggtgggcaccattcgcggcaatgccgaggaagtcgccggcagcagccgcgcccttgccgaactgagcagcgggctgcacgacggcgccgagcgccaagccggtgataccgggcagattcgtgactccctgggcgagctggaagcgacgatccagcaagtggcgggcgacgccagccaggccgccagcgccagccgcagtgcgggccaggcggtggagcaaggccagcgggtgattggcttgagcctgacgggcttgcacgccttggtcggcgaagtgcagcaaaacgcacagatgatcgagaaactcgccgaagaatccgccaccatcggcggcgtactgacggtgattcgctcgattgccgaccaaaccaatttactcgcacttaacgccgccatcgaggcagcgcgggccggtgaagccgggcgcgggtttgccgtggtggccgacgaagtccgctcgttggcgcagcgcacggctggcgccaccgccgaaatccagggcctgattgccagcctgcaaacagccgcccatcagtcggttgaaggcatgcgcgcccaggtcgagcatgccgaagccaccgcccggcaagcccaggcagcggatggcgcgctggatgaaatcgtgggagcgatccgcaccatctccgaaaccgccgtgcgcatcgctgatgtgaccgcgcagcagagtggcgccgtcagtgagattcgcgacaacagcgagcggattcaccagctgggcgaggataatttgctgcgcatcgggcaagggcgcagccagggtgagcatctgttggtgctgggcgggcagctcaatacggccgttcaagccttccgcgtctgacccgatctcccgccgtatgaagatcaacaatcatatggagatcaacaatgtgggagctggcttgcctgcgatagcggtgggtcagcaccttattgttaactgacagaccgccatcgcaggcaagccagctcccacatttgatcttctgtgtactcaggaccgtattgcccatgaccggaatccggggaccagtcacaaattttgcgcaatcctcgctaatcgtgctgcctactgcatagaactggacagtcacaaaggctttgcggcatagtcgccgggttctgccgtacccacatcaataacaaggaacagccgatggcgaccttactggttcttcacggacccaacctgaacctgctcggcacccgtgaaccgggcgtctacggggcagtgaccctggaccagatcaacctcgatcttgaacgcagggcccgtgaagccggccaccatctgctctacctgcaaagcaatgccgagtacgaattgattgatcgcatccatgccgcgcgcggcgaaggcgtggactttattttgatcaatcccgccgcttttacgcacacaagtgttgcattacgtgacgcgctgctggcggtgagcatcccatttatcgaagtgcatttgtcgaatgtgcacaaacgcgaagctttccgccatcactcctacttctccgatgtagcggtaggtgtgatctgcggccttggcgccagcggttaccgactggccctggaggccgccctggaacacattgaacaaccggccaagcgcccctgaccgacccttgggagttgatgattcatggatatccgtaaagttaagaaattgatcgaactgctggaagaatccggtatcgacgagctggaaatcaaggaaggcgaagagtccgtacggatcagccgtcacagcaagaccccggctcaacagttctacgcgccacagatgcaagcaccagcgccagccgctgctgcgccggccgctgctcctgctgccgccgctgctcctgccgctccggccgctccggcgctgaacggcttcgtggtcaagtcgccaatggtcggtaccttctaccgcaccccggcaccgacctcgccagccttcgttgaagtcggcaagaccgtgaaagtgggcgacaccatctgcatcgttgaagcgatgaagatgatgaaccacatcacggctgaaaaagccggcgtcatcgaatccatcctggtagaaaacggtcagccggttgagtacgaccagccgctgttcaccatcgtttgaaccgcggagtgccttcgatgttgaaacctgcgaagaaactggaaaaagtcctgatcgccaaccgcggtgagatcgccctgcgaatcctgcgcgcctgtaaggaagagggcatcaagaccgtcgctgtttactcgacggccgacaccgaattgatgcacgtgaagctggcggacgaaagcatttgcattggcccgccactggccacgaactcgtacctgaaagtctcgaacatcatcgccgccgcagaagtgaccggcgctgatggcattcacccgggctacggcttcctcgcggaaaacgccgacttcgccgaacaggtggagaaatccgggtttgccttcatcggcccgaaagccgaaaccattcgcctgatgggcgacaaggtgtcggccaaggacgccatgatcgctgccggcgtgcctaccgttccaggctccgacggcccgctgccggaagacgaggaaaccgctctgcgcattggtcgcgaagtcggttacccggtgatcatcaaggccgctggcggcggtggtggtcgcggcatgcgcgttgtgcataaagaagaagacctgatcgaagcggccaagcagacccgctctgaagcaggtgcctggtttggcaacccgatggtctacctggaaaagtacctgaccaacccacgtcacgtggaagtgcaggtactgtccgacggccagggccatgccatccatctgggcgaccgcgattgctcgctgcaacgtcgtcaccagaaggtactggaagaagccccggcaccaggcctggatgaaaaagcccgccaggaagttctggctcgctgcgtcaaggcgtgcatcgacatcaattaccgtggcgccgggactttcgagttcctctacgagaacggccgcttctacttcatcgagatgaacactcgtgtgcaggtagagcacccggtatcggagatggtcaccggtatcgacatcgtcaaggagatgctgagcatcgccgccggcaatgtgctgtcgtacacccaggacgacgtgaagatccacggccactccctggagtgccggatcaacgccgaagacccgaaaacctttatcccaagccctggcctggtcaagcatttccacgcgcccggcggcaacggcgtacgcgtggattcgcacctgtacagcggctacaaggttccgtccaactatgactcgctgatcggcaagctgatcacctggggcgctacccgcgacgaggccatggcccgcatgcgtaacgcgctggacgagatcgtggttgacggcatcaagaccaacatcccgctgcatcgggacctggttcgtgatgaaggcttctgcgaaggtggtgtgaacattcactacctggaacacaagctggctaaccagtaagtgctctgaaacaacaaagccgcctccgggcggctttgttgtttgtgggataccccccccaaaaaaaccctgtgggaactggcttgtgtgggagctggcttgcctgcgatagcatcgccccggctggacagataaaccgaggtgcctgcatcgcgggcaagcccgctcccacatttgttatgtgtacacccctcccgccgctcgcgtaaacttgcgcgctttcgcagccacaccccgctgcacactcattattttcaaaggtgcccgccatgccttggctgcaagtccgtctcgccatcagcccagaacaagccgaaacctacgaagacgctttcctcgaagtcggcgccgtctcggtcaccttcatggacgccgaagaccaacccatcttcgaaccggaactcaacaccaccccgctgtggtcccacacccatttgctggccctgttcgaagatggcaccgatgccgctgccgtcctggcccatatggaactgctgaccggcagcccgctgcccgagcatcacagtgaagtgatcgaagaccaggactgggaacgcagctggatggataacttccagccgatgcgtttcggccaacgcctgtggatcgtacccagctggcacgccgcgcctgaaccggacgccgtcaacctgctgctcgaccccggcctggcgtttggcaccggcactcaccccaccaccgcgctgtgcctggagtggctggatggccaggacctgaacgactgcaacgtgctggacttcggctgtggctcggggatcctggccattgccgcgctgctgctgggcgccaaggaagccgtgggcaccgacatcgacgtgcaagccctggaagcctcgcgcgataacgctggccgcaacaatatccctgaaggcaaattcccgctgtacctgccggagcaactgccccaggtgcaagccgacgttttggtcgcaaacatcctcgccgggccgctggtttcgctggcgccgcagttgtcgagcctggtcaagccaggcggccgtctggcactgtcgggcatcctcgccgaacagggcgaagacgtggccgccgcttatgcgcaggatttcgagctggatccgatcgcaaaccgtgatggctgggtacgcatcagcggtcgtcggcgctagaatgagcgcttgcctgaatcggatggccgcatgaccgacagtttcgtcacccagtgcccgcattgccaagcccgctttcgcgtcagccacgtccaattgagcgtggcccgtggcgtggttcgctgcggctcgtgcctgcaagtgttcaacgcggcccgccagttgctggagcaacgcgcccacgcgtctgcgccagaacctgagcagccggcggtcgttgaaacccctgcagcgccggcccccgaggcaccgcgcgcgatcagccagaaacagtggaccgccgaagagctggacctggacaacctggacctggacgaagaactggccaagctggaacgccgcgagattcagcacactcagccggcaggtggcgaacgtcgcctggccggcacagaccgcaggcaaaaagaagagtctctcagcgccagccgtgacacggtcaaggccgaggaagagaaatgggccgccagcctgttcagcgaaccgcctgaggaacgcacgccagcagccgaagacgaacctgaaccggccaaagcgcctgcgacccggcagcgcaccgagccgtccatgtcgtttcatattgatgacgtcgacgaagaaccaccgctgcgctcaacccctgacgatgacgaactggacccacccttcagcccactcaccgacgaagtgcacgagccggaacccgaagagcgccctcagccgcgccgtaaacgctcgcgcccggaggccagcgctcacgatgagatgctgcaggacctggaagacgacccactgcatctttatgcacagaagcgcccatccggctggggccgtcgcctgatctggatcgtcttggtcttcctggccgccgccggcctcgcaggccagtacatcgcctaccaattcgacgacctggcacgccaggacgcctaccgcccgtggttccagcaactgtgcccaagcctgggttgcaccgtgccatcgcgggtcgacatcgctcacatcaaaagcagcaacctggtggtgcgcagcaaccctgagtttgccggggcgctggtagtggatgcgatcatttacaaccgtgccacgttctcccagcccttcccgctgctggagctgcgttttgccgacttgaacggcaacctgattgccagtcgtcgcttcaagcctggcgaatacctgagcggtgagctcgccggagtgagcgaaatgccatcgcagacaccgatccatatttccctggacatcctcgacccgggcaataaagcggtgaattacagcctgagcttccactcgcccgagtgaatcggttgatgcaccaaggtttgacggcggattcttgacttcaccccgcgcaaccaaaccggtcgcgataaagaaataactgttcagattttatccaattcagcctttatccagtcatcgagagcgggtatcatgccaaccctttttcgaactctaatgatccggccccacaacagggaagtcctatgtcggcggtacgcatcggcccatacacattgcagaacggcttgatcctcgccccgatggcgggtgtcaccgaccagccctttcgtcagctgtgcaagcgtttgggcgcgggtctagtagtctcggaaatggtcaccagcgacatgagcttgtggaacacccgcaaatcgcggatgcgcatgatccacgaaggtgatcccgagccccgctcggtacagatcgccggtggagatgcacagatgctggcggacgcggcccgggccaatgtggagctgggcgcacagatcatcgacatcaacatgggctgcccggccaagaaggtctgcaacaaggccgccggttccgcattgttgaaagatgagcagttggtcgccgagatcctgcaggccgttgtcgccgcagtggatgtgccggtgaccctgaagattcgtaccggctgggaccgggacaacaagaacggcctgacggtggcgaagatcgccgaacaggcaggcattacagcgctggcagtgcatggccgcacccgcgccgacctttacaccggtgaagccgagtacgacaccatcgccgccatcaagcaggcggtgtcgatgccggtgtttgccaatggcgacatcgactcagccgagaaagcccggcgcgtgctgcacgcaaccggtgccgatggcttgttgattggccgggccgcccaggggcggccatggatttttcgtgagatcgagcattttctgcgtaccggcgaagtgttgccggcaccggagctgatcgaggtggaacgtattctgctagagcatctggccgccctgcacgccttctatggagacgtgatgggagtacgcattgctcgcaagcatgtcggctggtatctcgcaaccttgccgggcgccagggaatttcgcgcccacttcaatcgtttggatgatacggaagcacagtgcgccaacgttcgtgagtttttcagcgagcgttacaagagcctggggacaggggacggagagggggtggccgcatgacgatgatgaccgagactttagtgagtggaacaacacccgtgagcgacaacgtcaatttgaaacagcacctcaacacgccgagcgaagaaggccagacccttcgcgggagtgtcgagaaggcgctgcacaattatttcgcccaccttgagggcgcctccgtcacggatgtgtacaacctggtgctctccgaagtcgaagcgccgttgcttgaaagcgtgatgaactacgtcaagggcaaccagaccaaagccagtgagctgctgggcctgaaccgtgggaccttgcgcaaaaagctcaagcagtacgatttgctgtaagcattcaatcaaaccagaaaggcgcccgcgtaaaaaacggtcgccttttttgctgactcctttgcttttgatggaaattgaaatgaccgaccagactacccgcctgccgatccgccgtgccttgatcagcgtctccgacaagaccgggatcctcgaatttgcccgggagctggaagccctgggcgtggaaatcctctccacaggcgggaccttcaaactgctgcaggacaacggcgtggccgcagtggaagttgcggactacaccggtttcgcagaaatgatggacggtcgggtcaagaccctgcacccgaaaatccacggcggcatcctcggccgtcgcggcaccgacgacgcgatcatggccgagcacggcatcaagccgatcgacctggtcgccgttaacctgtacccgttcgaagccactatcaacaagccaggctgcgacctgccgaccgccatcgagaacatcgatatcggcggcccgaccatggtgcgctcggcagccaagaaccacaaagacgtggccatcgtggtgaatgccagcgactacgccaacgtgctggaaagcctgaaagccggcggcctgacctacgcccagcgcttcgacctgatgctcaaggccttcgaacacaccgccgcctacgacggcatgatcgccaactatatgggcaccgttaaccaggcggctgaaacactgtccaccgaaggccgcagccagttcccgcgcaccttcaacagccagttcatcaaggcccaggaaatgcgctacggcgagaacccgcaccagagcgcggcgttctacgtagaagccaaaccggccgaagtgggcatcgccaccgccacccagctgcaaggcaaagagctgtcctacaacaacgtggccgacaccgacgccgcgctggaatgcgtgaagagcttcgtcaagccagcctgcgtgatcgtcaagcacgccaacccgtgcggcgtggccgtcagcccggacgctgaaggcggcattcgccaggcttacgaactggcctacgccaccgacaccgaatcggccttcggcggcatcatcgccttcaaccgtgaactggacgccgagaccgccaaggcgatcgttgagcgtcagttcgtggaagtgatcatcgccccaagcgtgagtgaagaagcccgcgccatcgtcgcggccaaagccaacgtgcgcctgctggcctgcggcgagtggtcggctgaccgcgcggctgcctgggactacaagcgcgtcaacggcggcttgctggtacagagccgcgacatcggcatgatcggcagccaagaccttaaagtcgtgacccagcgcgccccgaccgagcaagagatcaacgacctgatcttcgcctggaaagtggccaagtacgttaaatccaacgccatcgtctacgccaagaaccgccagaccatcggtgtcggcgccggccagatgagccgcgtgaactcggcgcgtatcgctgcgatcaaggctgaacatgctggcttgcaggtagccggctcggtgatggcttccgatgcgttctttccgttccgtgacggcctggacaacgccgccaaggccggtgtgaccgccgtgatccagccgggtggttcgatgcgcgatgctgaagtgattgctgcggctgatgaagcgggtatcgcgatggtcttcactggcatgcgccacttccgccactgattgattggctctcaagcgggcactggccttatgtgggagctggcttgcctgcgatagcatcacctcggtgcaactgatacaccgaggcgctcgcatcgcaggcaagccagctcccacagaaaagcagcccgcagttcccccgagaattttgcgtcatccgaggtttttgaaatgaatgttttgatcattggcagcggtggccgtgaacacgccctggcctggaaagttgcccaggacccacgcgtccaaaaggttttcgtcgcacccggcaacgccggcaccgccattgaagccaagtgcgaaaacgtcgccatcgatgtgctggcgctggaacagttggccgacttcgctgaaaagaatgtgtccctgaccatcgtcggtccggaagtcccgttggtcgccggcgtcgtggacctgttccgcagccgtggcctggactgcttcggcccaaccgctggcgctgcccagctagaaggttccaaggcgttcaccaaggacttcctggctcgccacaagatcccgacggccgactaccagaacttcaccgagatcgagcctgccctggcttacctgcgtgaaaaaggcgcgccgatcgtgatcaaggccgatggcctggccgccggcaaaggcgtgatcgttgcgatgaccctgcaggaagccgaagacgccgtgcgcgacatgctcgccggcaacgcctttggtgatgccggttcgcgtgtggtcatcgaggagttcctcgacggcgaagaagccagcttcatcgtaatggtcgacggcaagaacgtactgccgatggccaccagccaggaccacaaacgcgtcggcgacggcgacagcggcccgaacacgggcggtatgggtgcttactcccctgccccggtggtcaccgccgaggtgcacaagcgcgtcatggacctggtgatctggccgaccgtgcgtggcatggctgacgaaggcaatgtctacaccggtttcctgtacgcaggcctgatgatcgacaaggccggtaacccgaaagtcatcgagttcaactgccgtttcggcgacccggaaacccaaccggtgatgctgcgtctgcaatcgagcctggtgctgctggtggaagccgccctggcccaggcgctggacaaggttgaagcgcagtgggatccgcgcccaagcgtcggcattgtactggccgccggcggctaccctgccgattacgccaagggcgatgtgattgaaggtctggacgcggctgctacgctggaaggcaaggtgttccatgcgggcaccgcgctcaaggacggcaaagttgtaaccgcaggtggccgcgtgttgtgcgccaccgcaatgggtgccagtgtcgacgccgcgcaacaacaagcgtacaaactggccgcaaaaatcgactggaaaggctgcttctaccgcacggacatcggctaccgcgccattgcccgtgaacgcggcgagaacagctgaacagctacacttgagtagctatccgttcggttaggtgagggcctctggcccttgccgtacacatgtcgccccgcgcatagttaacccgtgcatcaacctacgaagggatttcgccgtgcgctggctcaggatcgccataggtttcacagtcagcctgctgaccctgctctgcttgttcccggcccaggccgccgcgcaaggcagtggctgggcggtattgcttgatgaacaggccgacctgcagctgagcgacatccgttccgcccgctacaccaaccaattcagccccatcgaactcgaccgcattaccgctgcggagccggacggtgcgttgtgggtacgcttcaaactgcaacccggcaagcacgagcaagtgctgcgggtattcgccccggacctgtcccacctgagcctctacgtgctggatggcgacaccctgatcgagcaacaaagcaccggaacccgccagccccaggcggaacgcccgctgcccagcagtgacttcatgctgccgatgccgcaaagccagaagccccttgaggtctacctgcgcctggtctcggaacatgaactgcgcccctatatcaccctggaaccggccgtactggccgccgccgaccagaaccagacgctgatctacgggctgctgttcggcgtgctgttgatgctgatcctgcacaacctcacgcgctttgcttaccaccgctcacgcagcagcctgtggctggccgcctgcgaagtgctgttgatgctcagcctggcgctgctgctcaacctggtgggcccatggctgccgaactggcacgcggtgcaaacccctggcgcctacctagccctgctgctgaccgccccgtgcgggttgatgtttgcctaccgctttttcatgccgctgggcccgcacccgctgaacaagctgctgatggccgacatcctgtttatcgtgctgtgcggcttgttgctgctgttcgtcaacaccttgccactgaacatcatcacctatgccctggtggcccttgccgggttgagcatgctgtttgtctcggcctatcactggcaaaagggttaccgcccggcacgcctgtttgtggcggcgatggtggtgttcaacattggcacgctgatcatcctgccggcgctgcttggcctgacgctggtggcaccgcaaggcctaatcgtcaccctgctgagttttatctgcctcagcggcctgctgatgagcctggccctgggcgaacgccagcgcgccattgtcgaagcccgtttcagcctcagccgcgacctggccgccagcaacgccgaaattgccgccaaggccgagttcctggcaaaaatcagccacgaaatccgcacgcccatgaacggcgtactgggcatgaccgaactgctcttgggcacgccgctgtcggtcaaacagcgcgactacgtgcagaccatccacagcgccggcaatgagctgctgacactgatcaacgagatcctcgatatctccaagctggaatccgggcagatcgaactcgacgacgttcagtttgacctcaatgcgctgatcgaagactgcttgagtatcttccgggccaaggccgaacagcagaatgtcgagctgatcagctttatccagccccaggtgccccgcgtgatcagcggcgaccctacgcgcctgcgtcaggcgctgttgagcctgctggaaaatgccctgcaaaaaaccgatgagggtgaagtactgatcgtcgttgccctcgacgagcgcagcaccaagccacgcctgcgcatcgccgtgcaagacagcggcctgccgatggaagccgccgaacgcgacgcgctgctgcacagcgaactgcacagcaagaacttcctttcggccacgcgcttgagtggccacctcggcctggtgattgcccgccaactgatcctgttgatgaacggcgagttcgggatcaagagcggcagccatcagggcagcaccttgtggctgaccctgccgttggacccggaacgcctggaacatccgacctccgacctcgacggccccctcaaaggcgcccgggtattggtggtggacgacaacgacacctgccgcaaagtgctggtgcagcaatgctcggcctggggcctgaacgtcagcgccgtgccgtcgggcaaagaggccctggcgttgctgcgcaccaaggcgcacctgcgcgattacttcgacgtggtgctactggaccagaacatgcccggcatgaccggcatgcaactggcggcgaagatcaaggaagacccgagcctgaatcacgacatcctgctgatcatgctcaccggcatcagcaatgcgccgagcaagatcatcgcgcgcaactgcgggatcaaacgcatcctcgccaaacccgtggccggctacacgctgaagaccaccctggccgacgaactgacccagcgcagcaaaggtgttgtacaacctcgcccggccatcagcccgccagcagccgtgaccgtgcccagtgatttccgcatcctggtggccgaagacaacagcatctccaccaaagtgattcgcggcatgctcggcaagctcaacctcaacccggacaccgccagcaacggcgaagaggcgctggaggcgatgaaagcccagcgttacgacctggtgttgatggactgcgaaatgccgatcctcgatggtttctccgccacccaacaactacgggcatgggaagtcagccaccagcgtattcgtacgccggtggtggcgctgacggcgcacattctttccgagcacaaagaacgcgcgcgccaggccgggatggacgggcacatggccaagccggtggaattgtcgcagttgcgtgagctggtggaattctgggtggcccagcgccaacagcgcccggaacacgcgccttcctgacctgaaatacactcccttgtgggagctggcttgtgtgggagctggcttgcctgcgatgcagacacctcggtatctcaggaggacccggtggatgccatcgcaggcaaaccagctcccacatttgatctttgtcgcctgatagactctccccactcttctcgccgcgagccgcctccatgctccacgtgttattcagcgtctacctgaaaatgctggtgctctacagcccgttcttcgtgctgtcctgctttatcagcctgactcgcggctactccagcaaggaacgccggcgcctggcctggaaggtcgcgttggcaacgctggtctcgagcgtgttgctctacctgttcggccgggtgattttcagtgtgttcggcatcaccgtggatgccttccgcatcggcgccggcagcgtgctgttcatctccgccctgggcatggcccagggcaaatcagcggtacagaccgacaatgtgcagcaggacgtgaccatcgtgccgctgaccattcccctcacggtcgggcccggcaccatcggcgcactgctggtgatgggcgtcagccagccgcattgggacgacaagatcatggcaattctcagcatcgccctggccagcctcacggtgggcgtggtgctgtacctgtccaaccgtatcgaacgcattctcggcgaccagggcttgcagattgtcagccggttgatgggattgttcgtgtgcgccctggccgcgcaaattatcttcaccggggttcgtggctacctggtgccctagatccggtatttggcaatggccagctgcaccttgtcacccgcgctctcgcgcatcagctggatggttttttcgttgaccagcgcggtattcagcaccaggcaggtttgcccgctgaaggcctcaagcgaggtgctgtcccactccagaaaaggcaggcctacctgcttgttcaccccatgactgctgtaggtcacgagcaccatcatgacttcgccatcggtttcagcgcaggacgccaggccgaaatcaccgccctgatgcaccgtgcaattgcgcttgaacaactcgaaagaggccggttgccgcttcagcgcttccaatgcatcggcggcgagtttcggcagccccgcaaggattggccccgccagcgaggtcgtcgtcagcatcgcggcgatgatattcaacgccgccagttgcacggtcagccccttgccggagcttgagacccgctcaaagcggctgcgcaccggcagccagcccaggctgaccattacctggataaattcgtcgtaccaacgctcggtgccccggttgaccttcaacacatcactcacataactgctggccagcaggtagcttttgcggatgtactcccggttcagcgccgacatgccctccacaaacgagatcacgccgttgtttaccacggccgcgttgctgtcatcttcgtcgtccggcgccacggcggcgggcaacccgggcgcccccggcagcttgtaggcggcaatcaacttgcgccgctttacgctgttaatccttcggcgatatcgctccattttcacttctccacaagcaccccaacgtggggcgtgtgttcacactagttcaggcaccgacgcgctttccagaccacaaacatcgcttgcctgccccttcggaaaagcgctgcccagcaatggcggggctcgcgcggcacccttccggatttcagccgtaaaaaaagaaaaagccccgaaaaacggtgggcaaacacccgacgttattcggagctttctctggtgtggcaggctgttttcaggaggcaggtttttcgccataccagcgcggcgtatacacccattcaccgccacccgcgcgcgggaacacgcaggtggcggacgagccgatcagcaccatggtgcgcatatcgacttgctcgggtgtcagttgccccagcgtggtgactcgcagcgtctggccggggcggccgatatcgcggcccagcaccacgggcgtttcagcggtgcggtgtagcgccacaatttccagcgcgcgccccaattgccacggccgcgaacgcgaaatcgggttgtaaaacgccagggccagatccgcctgagaggccaggtccaggcgcttttcgatgatcgaccagggtttgaggttgtccgacagcgacatcacgcagaagtcatgccccagcggcgctccggctctggcagcagtggcgagcgaggcggaaacacctggcaggatttccaggtcgacctgatgccaggccgggtcgctggactcatgcaacgcctcgatcaccgccgacgccatggcaaacacgccagggtcgccggacgacaccaccaccaccgagcggccctgcgcggccagctcgaacgcgtggcgggcccgttgcatttcttcgcggttgtcggtgcagtgctggatctgatcgtcacggaacggcccggccatgcgcacgtaggtctcgtagccaagcacatcggtgcagcgcgccagttcagccttcactgccggcaccatcaactcggcagcaccggggcccaggccgatcacggcgaggcggccacgaccacggccgacgtgcgccaggtccaatggttgctcgccgacagtgatcaggatgtctgcgtcttgctctaccgaggcgaaacgcaacggcaccgccaaggccgacgcggcggcatgcaacgaggcttcagccatttgcgtatcgctggccaacaagcaggccaacgattgcacggcaatgcccgcctcctgcagggctgttcgcacacgctcggccaggtgctcacccggcttgcaggtgacacacacattcttcggataaatcagcagctcattggcagccggttcacgggcgtcgctgccaacatgaatcgccaaacgtgcctgttggtcttgaggcaggttggcgtggtccagccacggcgcagcgccttctatacgcacgctttcgcccgccagcaggtccgagacaaaccgcttgcccagctccaggtccgccaactcataccccttgggcgggttgagcaggcaagtgccgaagcgtaactcgccactggtggtgatcgcagccgccacattcagtgccgtcgcaatctcgcgcgccatgacattcacaccgccaagcccaccgagcaacggcactacggcgctgccgtcttcggccaccgccagcacggcgggttcttcgcccttctccagcagcaacggcgccagcgtgcggatcacgatgcccgccgcgcacaaaacaatcagcggcgtgccttgcccatacagttggcgcagggtcgcgccgaactcggcataggcttggtcggcaccttcaacccgtccagccagaccgtgaatccgggcgcccgggtagacctgctggatcttgcgcgcagtcgccaggctgccctggcccaagataacaatcgccggattcatcacccttgccaccgctcgcccggcacgatgatcagcgagaagtacggcgacgaggccgggtccacctgatccagcggcacgatcttctggttggccatggtcgcgcgctccacatacagcgcgcgcccggccaggccgagttcttccagcacttggcgcactttcggaaagttgcgacccagcttcatgatcaccgccgcatcggcgtccgccaggcggcgcttgaggtcgtcatggggcaacacaccggacagcaccgacaggctctggttgcgatacaccagcggcgcacccagcaccgaagcgccgccgagcatggagcacacgccagggatgacctgagcttcatagcgctcggccaggcggtcatgcaagtacatataggagccgtagaagaacgggtcgccctcgcagatcaccgccacgtcgcggccggcgtccaggtgcgctgccacgtccaggctggcggcatcgtagaaatcgctgatgacttgctcgtaggacatcggcgccggcagcacttcggtggtcaccgggtacaccagcggcatcagggtttgttgtggcaccaagtggtcttcgatgatgccgaaggcgttgcccttcttgcccttggccacaaagtaggccaccaccggcgactcgcgcagcaggcgcaacgccttgagggtaatcagttccgggtcgccggggcccacgcccaggccgatcaaacgtccgcgtactggcattattcgacctccgtggccagagcgttgactgcggcggcagccatcgcgctaccgccgagacggccctgcatgatcacgaagggcacgccatggctgtccgccgcgagcatcgccttggattcggcggcgccgacaaaacccaccggaaaaccgaggatcaacgccggtttgggcgcacccgcgtcgagcatttcgagcaagtagaacaaggcggtcggtgcgttgccgatcaccaccacgctgccttccaggtgcgggcgccacagttccagtgcggcggcggagcgggtgttgcccaattcgcgcgccagctccggcacgctatcgtcgcgcagggtgcagatcacttcgttgttggccggcaggcgcgcacgggtcacgccttcggagaccatccgcgcatcacacagaatcggcgcgccagccgccagcgcatcgcgcccggccttgcccgcaccgtcggaaaactgcaggccgtcgatggcctcgaccatgccgcaggcatggatcacgcgcaccgcgagtttttccaggtcggccgggatacggtccagcttggcttccgcgcgaataatggcgaaggagttgcgatagatctcctgaccgtcgcggatgtaatcaatcatcggtgttgctccgtgggtgagcgcgcaacagggcgcccgccgcttcaatggaaagggtgcgcgcgtgcagccggccgaaacccgggtgggctgcatcgcgaaaatagaggtcgtagtggccggggctgacggccagcaaggtgaccggcgcggtgtgcgcggcggcgcaggaacgtgggcagccagacaggtgcacctcgtgcttcggttgcagcgcggccagctgcacggcatccgccttggtgtcggccagtcctttgccacagccgctggagccggtgcaggcgaccatgcgcgccaggggctggtcgactgagcagaggaagcccaggcgttccaaaccgtcagtcacggcatgaggatttttaacgttgggcagcagcacgccctgccagggcgtgaaacgcaaggtgccgtcgccgaactcgctggccagctgcgcaacgccgttgagcatgctcgaatccagacggcccaagggtgcgacggcggcaacgtagaactggttttgttcgtgctgtggataagtaccgaggtgcaacagggccccactggccgggcgcttgaagtcgtcggcaggccgcaatggcaggcgcagatgcctcaataacttatccacagacagatggcgcatgcgggtttgctcaggcgtggccaggtcgagaaaggcttccagcacagccaccaccagcgcatggccctgctccagcgacacggccgccagcggcgcatccaaccccgggcaaccggccaggccgaacgccaacaacgtttcgcccttgcgctcaaacgccgacagccacaggtcatggtgatgttcaagcatggccagggcctcgccgccatcgagttgcacggcgaacttggccgacagctcatggaaacgcgggtgattttgcagggtggcaaggatttgatcggccagcgggcgggtgtcgaacagcatctgcgggtcgatgccggcgctggggctgagcatcaggttgcgtacgtcgtcaccggcggcgttgtttgggccgaggtccgcagcgagcagcatggcgatcagggcatcgctttggacgccgatgccgcgaatctgcaggttggcacggttggtcgcctcgatcaccccgcccgcataggcccgggccgcgtcggccaccgcgtgagcctgctttgcggtgatagaaccaccggccaatttgatccggcaaatgccgccatccagcgcctggacgatacgcagcaaccccgggcaggccgaggggcgtaaggtattcgcagcgggcgtctggttcacggggctaccggttgacgggtaaaggcgcggtattatgcctgctttgtccggcggcatgaaaagcctgcccgtcggatgtcgttcaaggaattcatatgtcgccctggctgacggttgtaggcatcggtgaagacggcttcaaggggctgggcagaaacgcccggcacgccctgttgcgcgccacccggattataggcggccagcgccagttggacctgctgccggtgtgtattcgcggcgagcgccagctgtggccgagcccgttttcgctggagccggtgctggccagccgtggtaagccggtgtgcgtgctggccagcggcgatccgatgttttatggcgtaggcgccagcttggcgcggcaggtggcgacggatgagttgctgatattgccggcgccttcatcggtttctctggcggcggcgcggttgggttggccgttgcaggacgtggtgacgttatccgtggtggcgcggccattggcggtgttgaatgcgcatctggccagcggcgtgcggttgttggtgttgagtaatgacggtcgcagcccggcgttgattgcctctttactgactgaatccggtttcgggccgagccggctgagtgtgtttgagcacttgggcggcgcggatgagcggcgcatcgaaggtttggcgagtgattggcaacaggtttcaatcgccgatttgaatctggtcgccatcgattgcgtggcctccagcgaaacaccgcgcctgtcgcgcctggcaggcctgccggattcagccttcaagcacgacggccaattgaccaaacgcgacgtacgcgccatgaccctcgcccgcctcgcaccgatgccgggcgaactgctgtgggacgtgggcgcgggcagcggctccatcggtattgaatggatgcgcgcccatccgagctgccgcgcgttggcgattgaggcggatgaaggccgacaggggttgatcgaacataaccgcgatgctttgggcgtgcccggcctgcaactgattcgcggcaaggcgcctcaggcgctggatggcctggaagtaccggacgcaatcttcatcggcggcggcgtgacacgcgagggcgtgctcgatacgtgctggcaacagctgcggcccggtggccgcttggtcgccaatgccgtgaccctgcaaagcgagatggccttgatgaactggcgcgcccggcacggcggcgaactgacgcgcatccatgtcgcccaggcccagccgctgggcgaattcgatacctggcgccaggcattgccgatcaccttgctggacgtggtcaagccgctatgaagcgcattctgttgctgggcggtgtgactgaggcgttggcgattgctcgcacgctcggcccggaacacatctacagcctggcgggcgttggccgggtgccgacggatctgaattgtcaggttcgggtcggcggttatggcggggcgcaggggctggcgcagtttgttcgggacgaaggggttggtctggttcttgatgccacccatccgtatgcggcgcagatcagccgcaatgccgctgaggccgcacgggcgtgtggcgtgccgtgctgggcgctgcggcgtccggcgtggcagccacaggcgggagatgattggcgggaagtcgcggactggacctcgttgatcgaagcgcttaaacctttcaagcgcccgctgttcacgctggggcgcgagccattgcagcatctgaatgaaatcccgccggagcagttctggacactgcgcgcgctggacgtgtacccgggcaatgagcggtgtgaagtgatcggcgcgcgcgggccgtttttgatcgaagatgaacgcgcgctgttcgaacggcgtggcattgatgtgctgatcagcaagaacagcggcagcacggcgaccgagccgaagctggaagtggcacgggagcgcggcgtgccggtgctggtgttgaaacggcccgtgctggcggctgtcgaccgagagttcaccgccgtggcagcggtgctgcaggcaatcaccaccttctaaacaccacatatcccctgtgggagcggacttgctcgcgatagcagactgtcagtcgccagagatgctgactgacccaccgccatcgcgggcaagcccgctcccacagtaaagcaatctcctctgtcgccacttccctaaaagccgaaaccacctacaaacacttccgaaccagctggctggttcaagcaaaagcccccgccctaacctccctcctcgcggtttcgcgtcatccagccgcaatggggatgcctgcttttgcagcgcctcgcaacttgccagcgtgtatcccaaggaatacgatcagcgatgattcatttcaaaaaatcaaaggaatttcaggaatggctcgtttcattacgcagtaacgctgcccgcgcacgcgtgataacacggttagataacgcaacttatggaaattttggagactgtcagtcagtaggaaacggcatatcagaaatgcgcatccactatggtcctggataccggatttacttcacgcgtaagggcgatgtgatttacctgctgttgataggcggcgacaaatcaacccagaagcgtgacatccagcacgcaaaaaaaatcgcagaagactttgaaaacgggagtacctcatggctgaatttacagattttgatgtcgcggactacctcaagacccccgaggacatggccgagtaccttgaagcctctttcgaagaggactccggcgacggcttgctgattcgctcagccctcaacaatatcgcccgcgcccaaggcatgacccaaatcgcccgcgacgcagggctcggacgcgaaagtttatacaaagccctttccgccactggcaatcctgaattcgcaactatcatgaaggtcatgaaagcgctggggctcaagcttcacgccacagcaatctaatagtactgcgacaccaaaccacaccgcccctttttacttatccaccccgatcaggctaaatacccccctgatcgtttaaccctacggattgtccgccatggcccgtcaacgctttgcaattgtgtggatcgcctgctttgcagtgctgttcaacgcctttgccatgccgatggccggggcgatgcagcagtcggacgacccggtcaaacagctgttgtggggcagtttctgctcgtccaacggcgccagcctgaagaccatcgcgctgggcacgctggagattccggcaccgcagcaggacgatcactccaccatgcagcattgctggtgctgctcgggctcggcgccggtggtggcgctgccggggcatatgccgcagttgtatgtcacccgttttgacgccgtgctgggcctgtcccggcccgccctgcaaaaccccaccccgcgccagcaatggccgagcctcaacccgcgcgcctctccaacggtctgatttcttcgcaagtgaactgcgtttagaaccgttctggagaactgccatgctcaaatcttccctgcttctggccgcgttgctgttgccggtgttcagtgctgccaatgccgatgactacaaggccggcgacctgttggtcagcgacccctggtcccaggaattgccgcccaacgcaccgacggtggcggcgtactttgtgattcataacacgggggaaaccccggaccgcctgctcagcgtcgaaacgccggtagccgacaaggccgagttgcacgagcacgtcatgcaaggcgacctgatgaaaatgcagcaggtgcccagtgtggcggtgccggccaagggcgatctgacgttcgcgccgatggcctatcacgtgatgctgctgggcctcaaagaccgcagcctgctggccgatggcaagcaatttccgctgaccctgaccttcgaaaaggccggcaaggtggaagtagaagtctcggtgcagaaggtgccgccaatagctacccacgagcataaacacgccaggtaggccagcctcgatgggcgcccctcgcgccaggttttctccacacgcccgcgtgagacgcggccgttggatcagcctgttcgccatgctgatgatctttatcggtccgctgatttcccaagcgatgccgatggaccatcacgccggtatgtcgatgagcatgtccatggacatgccgatggaccacggcgactcccatcaccccaaagcccctgacgaacaccacgccctctggtccaagtgcggctattgcgacctgctgtatagctgcccggccctgcccggcggcctttcaaccttcaccctctccaccccgccatcggccgacgcccttacccccgccccacgcttgggccacgcccgacaaagcatcttccccggcgcccgcagccgcgcaccgcccgtcaacgcgtaaaccctccacagcgttacttcaccccggccgactttagacagacagccgcaggctgctggccgtgttgtttacgattgattgatggaatttgtcatgtccaggttttctgctgacacccgtttgggaagcactcccgtggtcgccgttctgtgcggcgcccttttggctccactcgcccacgccgacgagcacgaactgagccccacggtcatcaccgcgatcgcccccagctcgccgctgaccgtggtcaccaacccgaaagacccgcgccagccggtgcccgccagcgatggcggcgactacctcaagaccattcccggcttcgccctggtgcgcaacggcggcaccaacggtgacccggtgctgcgcggcatgttcggctcgcgtctgaatatcctcaccaacggcagcatgatgctcggcgcctgccctggccgcatggatgcgcccacctcgtacatttctccggaaacctacgacaagctcaccgtgatcaaaggcccgcaaaccgtgctctggggcccgggcgcctccgccggcaccatcctgttcgaacgtgagcccgagcaattcggtgaattgggcacacgcctgaatgccagcgttctggccggctccaacgggcgtttcgacaaagtgatcgatgccgctgcgggcgggcctttgggctatgtgcgagtgatcggcaaccaggcccacgccgatgactacaaggacggcaacaacgacaccgtggcctcacgctacgacaaatggaacggcgacgtggccgtgggtttcacccccgacgccgacacgctgctggagctcaccgccggccgcggcgatggcgaagcgcgctacgccgggcgcggcatggatggctcgcaattcctgcgtgaaagcctggggctgcgtttcgaaaaatccaacatcggcgaggtgctggacaaggttgaggcgcaggtctactacaactacgccgaccacgtgatggacaactacacgctgcgcacgccctccggcaccggcatgatggccgggcccatggcggccaacgtcgaccgccgcaccctcggcgcacggatcaaggcgacctggcgctgggccgatgtgcaactgatcggcggcctggatgcgcagaccaacgaacatcgccagcgcagcagcatgggcatcgacacctacaaggacttgccccgggaaaaggacgccaacttccacaactatggcgtgttcggcgagctgacctggtacgccgccgaccgcgaccgcctgatcaccggcgcacgcgtggaccgcgcctcagccaaggattttcgccagaccacaagctcgggaatgatgagccgccctaacccgaccgccaacgacacccgcgccgacacactgccatcgggattcgtacgctttgaacacgacctggccgacagcccgaccaccgtctacgccggcctgggccactcggagcgcttcccggattactgggagttgttctcgccgaacaccggcgccgtgggctcggtgaacgccttcgacggcgtgaagccggagaaaaccacccagttcgacttcggcgcgcagtacaaaaccgccgacctcgaagcctgggcctcgggttacatcggccgcgtgcaggacttcatcctgttcgactacacgcccggcatgatgggcaccacctcccaggcgcgcaatgtcgacgcgcgcatcatgggcggcgaattgggcgcggcgtacaagctgacgcgccactggaaagccgacgccaccctcgcctacgcctggggcaagaacaccagcgacggcaaggcgctgccacaaatgccgccgctggatgcgcgcttcggcctgacctacagcgaagacgactggagcgccggcgccttgtggcgtgtggtcgcggcgcagaatcgcattgatcagaacaagggcaacgtggtcggcaaggacttcgacaaaagcggcggctttggcgtgttctcgctgaacgcggcttaccgcatcaacaaacacttcaaggtcagtaccggcgtcgacaacctgttcggcaaggcgtatgccgagcacttgaacctggccggcaatgccgggttcggctacccggccaatgacccgcaggccatcaaggagccggggcgtacgctctggaccaaagtcgatatgagcttctaaaagcatcgcgggcaagcccgctcccacatttgatttgtgaatacattcaaaggtgggagctggcttgcctgcgatggcggcccaactgacacaaaaaatcaaagccttgcggagcaccctgatgaccacccaaaaagtttccttctacaacctcgcctggcgctggcacttctacgccgggctcttcgtcgcccctttcatggtgctgctggccctgaccggcatcatctacctgttcaaaccccagcttgatccgctgatgtacggcaacctgctcaccgtgcccgccgccgagcacgcgctgagcgccgacgagcaactgcaacgcgccaaagcggcctacccacaagcagcgatcagcaaatacctgccgcccgccaacaacaccagcagcgcgcaattcgtaatgcgcaacggcggtcgcgaagtcaccgtcttcatcgacccgtatcgcggcaccgtactcggcgagcaggactcgaagtacaacctgcaagccatcgcccgcgcgctgcacggtgagctgatgataggcacagtaggcgaccgtctggtggaactcgccgccggttggggcgtgatgctggtggtgtcgggcgtgtacctgtggtggccgcgcggcaagtcttcggcgggggttttgtggccgcgtttcagcacccggggtcgtgtgttctggcgcgatatgcatgcagtcgccggcttctggggcgcggcctttttgctggtgatgctgctcagcggcatgacctggaccggcttctggggcaagcaatacgccgacctgtggaacaccttcccggcggcgatgtggaataacgtgccgcagtccgaccagcaagcacgcacgctcaacaccgccagccaacagaccgtgccgtgggccctggaaaatacgccgatgccgatgtccggcgagcatgccgaacacatgaaccacggtgccatgcatgccggtccggccgcgccgacggtgagcttgcaacaggtggtggacctggcgagcgcgcgcaaagtcgagcccggctacagcatcactttcccgaccaccgctacgggtgtattcactgtctcggtgttcgccaacgacccgcgcaatgacgccaccctgcatgtggaccaatacaccggcaaggtcctcgccgatgtgcgctgggaacactacaacaccgtcgcacgcgccaccgagaccggcgtgatgctgcatgaaggcaagatgttcggctgggtcaatcaactgatcgtgctgctgatttgcctgatgatcctgctcagcgccgtcagcggcgtggtgatctggtggaagcgtcgcccggcaggcgggctgggggttccgccgctgcgtcatgacttgccgaagtggaaaaccgcgatggtgatcatgctggcgctggcacttgttttcccgctggtgggcgcctcattgatcgtggtgtgggcgttggatcgcctcgtgttgtcacgttttttcaatcaacatgaatctgcctcaggttcggcatgagccaggcgagatgcccgtggcagaggccttctgtagccttgcgcgacttttgtcctgcagccaataagtgttaacttataacactttctgcgttatcgttgctcgccgcgccctgcggcgagcaacccttcaagaagactgatcgaccgatgaacaagtaccttgcgtccggcctttgcctgctcgccctgcacaacagtgcccaggccctgaccctgcccgccagccccgtcaccgcgcctgccgtcgatgcagaacgcgtcgacctggacaccccgaccaccgccggttcgcggctgaacctcacggcgcggcaaacccccggcagtgtcgaaagccagaccggcgaaaaaatccgcgagcgtggcgatgccagcgtgcaggacgccatctcccgcgccaccggcatcacccgtacaggttcaccgggtgacggtggtacttcgttgcaggcgcgcgggtttaccggacagagttcagtgctgcaactgtacgacggccagcgcatgttcgacggcgccggcacttccaccttcccggtggacacctggtcggttgaacgcgtggacgtactgcgcggcccggcgtcggtgatgtatggccagggcgctaccggcgcggtgatcaatacgatcccgaaaaagccgtttgaaggcgagatcgaaaaccatgtccgcctcggttatggctccgatgatcgacagcaggaagccctcgacagcggcggctcgctgactgacaccctgagttaccggctgaatgtaaaccgcctgcgcagcaacggttttatcgagcgtggcgactccgccagcgacttcgtcagcggcgccttgcgttggcagccggccgacaacctgagcttcaccctgtcccacgattacggcaaccaaagcccgcagaactattacggcacgccactgatcaacggccagttgcacaaaggcctgcgcgacaagaactacaacgtcagagacgacaagcaactctacaacgaccagtggacccgcctgacaggcgagtggcagatcaacgataacgtcaccgccaccaacgagctttcgtacctgaaaaaccagcgccgctggcagaacgccgagagctacaactacgtcgacggcggcctggtgcgccagagctacctgggcatcaagcatgaccaggaacaagtgggtgatcgccagacgttcacgttcaagcacacgcttttcggcctcgacagccagaccatcacgggcgtcgaatacaaccgtattcgttttcgccttgccagcaactcgccctttaatgatttgaccgacgctggccagccggtcgacattcagcaccccgtgccgcagccctttgaaagtgccagcccgtttattgcgcagtcggtgagcaccaccaaacagctcgctgccttcgctgaaaaccgcctgcaactgaccgacaaactctcgctggtcaccggcgtgcgccgtgactacctgcacatcgaccgccaatctttggtggatggcagcgactccgacaagaccctcaccggcaacaactggaaggccggtctggtctacgcgatcacccccgacacttcggtctacggccagtacgccaccagcaccgacggcgtcggcagccttatcaccttgagcccgagccagcagcagttcggcctgtccaccgccaagcaaagcgagatcggcctcaaacaatccttctgggattcgcggggcgaatggacgttggcggcgtatcacattgtgaaaaagaaactgttggtgagcattcccggcactgatcagaaagaacaggtcggccagcaatcttccaacggcctggaagccagcctcgacctgcaactgcccgacgcctggcaactgcaagccaatgccgccatcgtgcgcgcgcagtacgacgacttctccgaagtggtcaacggccaggccgtttcccgcaacggcaaccgccccaccgacgtaccgcgccgcaccgccaacctttggctgagcaaagccgtgaccgacgacatccgcgccggcgccggggtgcgctatgtggatgcacgttatgccgacaccgccaacaccagcgaagtcccgagctacaccgtggttgacgccaccgtgtcgtggaaagccatgcgcaataccacgctgggcctgcaattgaataacctgttcgaccgcacctacgccgtgagccagtacaacgaaggccagcagtggatcctcggcgaaccgcgctcgttcttcgtaacggcggactacaccttctaaccgaacattacacagcccccctgtgggagctggcttgcctgcgatagcggtctatccggcaaaggtgtattgcctgccccaacgctatcgcaggcaagccagctcccacatgttgaacagcgtttaatttgagagacacgatgacctcactcaccctcacccgcctcacctggacgccccaggttcacggccactgccttcaccagttccacctgtgtgatgccagcctgcaggtcggtgcgggagagtttgtggggctgatcgggcccaatggcagcggcaagaccagcctgctgcgctgtgcctaccggttcaccaaacccgatcagggcgacgtgtctctcgcccaccagaacgtgtggaaacagagcgcgaaatggtgcgcgcaacgcgtcgcggtggtgctgcaggagttccccgatgcgttcggcctgcgggtggatgaagtggtcgccatgggccgcacaccgcataagggtttgttcgacagcgacaccccacatgatcaacagctgatccagcaagcgctggaatccgtcggcatgcagggtttcgaggaccacgccttcgccaccctctcaggcggtgaaaaacaacgcgtgatcctcgcccgcgccctggcccagcaacccgagctgctggtgcttgacgagccgaccaaccacctcgacccgcgttatcagcttgaactgctgaggctggtcaaacgcctgaacatcggcaccctggcgagcatccacgacctcaacctggccgccgccttctgcgaccgcctctacgtgatcgaccacggccgcatcatcgccagcggcacgccccatgaagtgctgaccgtcgagttgctgcgcgatgtgtttggcgtcgacgccctgatcgacccccaccccctgtccggctacccccgaattacctggataacccaaccatgatccctcgcgccctcctcgcctttgccttgctgttcggtacctctcacgcgttcgccgaagcgacccattacccggtcaccgtcaaaagctgcaaccgcaacgtgaccttccaggaagcgccgaaacacgcggtcagccacgacatcaacatgacccagatgatgcttgccctgggactcaagttgcacatggccggctacagcggggtgactggctggaagtccgtgacgccggaaatgaccgagatactcgacggcctgccggagctggcgagcaaatacccgtcggtggaaaccctgctcaacgccaacgtggatttcttcttcgccggctgggattacggcatgcgcgtgggtggcgacctcacaccggccaccctgcaaccgctgggcatcaacgtgtatgagttgaccgaatcctgcgctttcgtgatgaagcggccagccgcgacgctggaggacacctataacgacctgcgcaacctcggcaagattttcgacgtgcaggaccgcgccaacgcgctgatcgcgcagatgcaggcgcaaatcgccgaagtgcagaaagacctgcccgccgacaaacctcgcgtgtttctttacgacagtggcgaagaccgcgccatgacctccgggcgccttggcatgccccaggcactgatcgacgccgcaggcgggcgcaatattctcgatgacatcgacgccagctggacccgcgtcaactgggaaaccgtggtggagcgcaacccgcaggtgatcgtgattgtcgactacagcgaaatcaccgccgaacagaaagagcaatttttgttgaataacccggcgctgcaagcggtggacgcgatcaggaaccagcgcttcatcgtgattccgtatgtgcaggccacgccgggtatcgataacgtgctggcggtggaaaccctggccaaggggttccacggcgaatgatcacccgtcgctacgccttgctgctggccgcccttggcgcgctgttgctggtctcttgcgtgatctcattgggcttcggcccggcacgggtgccggtggaggtggtgtggcgaattgtgctgtacaaggcgttcggcatgggcgaggtgaactggccggccgggcaggaacatatcgtgtggttgatccgtgtgccgcgcatgctgctcggcgcgctggtcggcgccgggctggccttgatcggtgcggtgttgcaggccgtcacacgcaacccgctggcggatccgcacctgctcggcgtcacttcaggcgccacgctgggcgcggtgattgtggtgttgcatgtgggtgaaatcgtcggcctgttgacgctgcccatcgccgcgtttatcggcgcgttggcgagcatgctggtcgtgctggcggtggccagccgcaacgggcggttggagagtgatcgcctgttgctctgcggagtggcggtgtcgtttgtgatgatggcggcggccaacctgttgctgttcatgggcgatcatcgcgccgcttccgccgtcatgttctggatgctcggcggccttggcctggcgcgctgggaattgttagccattcccgccaccacggtgctgctggggttgttggtgctggtgggcatggcccgcccgttgaatgcgttgatggcgggcgaacaaaccgctgtcaccctcggcctgaacgcacgcactgtgcgtttgaaggttttcctggtggcctcgctgatgaccggcgtgctggtgtccatcagcggttccattggttttgtagggctgatggtgccgcacattgcccggcgcctggtcggcgccgagcaccgccggttgttgccggtgtgtgcgctgctcggcagcctgtttctggtgtgggtggacgtggctgcgcgtacgctgatcgcccccgaggacttgccgatcggcgtagccacggcggcgattggcgggttgttttttatcgggctgatgcgcaagcgttagtcagatgactcacagctcatccttgcccggtcggtaggtcgcgtcgccagggagtctcaagtcgctgccgaccagggtgcgtatcgtccagaaattgccgcggcgcagcacccgaaactggccgagtcgcgccaactccgagagcgcatgtgaaggcgttggagcgtaggctgtgtaacctccctcggcagtccatttgccattgacggccaacaagttggcttcgtcctgaccgaaggtcggggtgtagctcaacaaggcgccgtcgcgcgctgtcaggtagaagccggtgatggggagcttctgctttttcaattcgtacaggtaaaaactgagttcgcgccacgagacgaagtactcggcgtacgactgttcgacgccgggggcgacctgatccagccccgcatgaaacagcagatgagcggcgctgaccttgtaatcggccggccagccagcagccacctggaacaggcttggggctatccccgagggaaacccgtcgtcaggcgtggccagtacgggtacatgattgctgctcacggttttttccagcaatgcactgattgcctgctgcccggcaaggcgtcctgcccgctcgtgcacaaaaccggcggcgtcgtcgcggtgaacatgcacagggcccagtgcccatgggttttcgccagtcgccaatacaccctgtgaccgcccccgctgccactgcgcacccaccacgccaacaccaggccagttgtcgctgggcaccagaatgcgcaactccccggccgccgctatgcgtcggatgtaatcgccggggctgagttggtgcgttttcaacttgatgtcgtcctgataatccacaaagcgactgttgcgcacggtgaacttcagcaaggcaccatcggcacacgacaaatacacagggaacgccgcgcggctcgcagtggcgctcacttggtacatcgcccgtatcaaccgcgaaggggaaatcaacccgcgatagatggagcccggggtcattatcaggccgcctggttgaatgtcaccccattgcaggccacacagatacagccccgccatttgataacgatacgggtagccggcatccgcaaaaacccgacgatgagccaggtccgagccgccctcggtgactggcagcgttgcgacaaaatgcccgttgccggtcgattggagcacatagccaaactgcgcctcatcccttgagccggcatgttcatgggcataacgcgcagcatcatcggcgcgggtgtgcagcgggctgaaagcaggatcgacactggcttccaggtaccgccggccacgcaggttcacgctggcaaacggactccaaccggcaaccaccccaggcgctccccacatcgtgctgccaacaaccacctgcaagtcaaacgttgtactcacgcgggtaacatactcgccgggggccaattcaccgttgcgtatctgccgttcaagcgccccgttgagccagtcgcgacggttgcgcgggcgtgtgacaagcgctgcggccgaaatggacgggtatttcaattcggggcgcggcttcaagcgtatcaaggctccgtcgggcgccagcagatagtggtagtgacgcgcttgagcagcagacagcgactgggccagcaaccgtgtggaaaacatgttgccgtacaccgccgactgcgctggcgagagcaaaaacggccattgcatcgccggtcttgagtgatagctggcaacaaccgccgtgcgcggcgggtagagcccacgggtcaccatttcgtcggggaagatgcttttgatatcgaatacttcgtccgacactcgcaccggttcagtagcaacaaaccagccatcgtcacgacgcaggataatgccgccgtagggctgatccaggttcggcgagacgcgacgacggatgtactgtgcaacatcatccatggaaagaaacgccgggctgagacggcgccgttgcaggttttcatagggcacccacagccccgtcacatcgccgacgacgccccagcaatggctggtactcacaacctgcaaaaggccggaggacgctacccgccgcacaaactgcaggggttgcaaggtgccgatatccagcttggcgcgcaccgtttcaagtgggtctgcctcacttagcgactcgaaaatcccttgagtagacggcgactgatagcgcaacagggcaccttccggcgtggcgatgtacaccggggcgccgcggggcggccgcagcatctggatacgcgcctgggcaatggcctcactcaaatcctcaggttcgataaatacccgttttaaccaggctgccgaaccattaccgacaaactggttggcgtaatacaggctgtggcactcgaatccgtcagggagtctggtgccgtacaggctggcgagggacaacaacggggacttgccggtggcgggaatcaactcactggcgacgtattcttcccggtgttcgtgcttgaggatgaaagcaaaatagcgactggcagagtggtccacatggtcttgcgggtcacgccggcacaggtcgctggcagcgtcgtcagcggtgttgaagacaggcccgtggctcaccgtcgcgggtcgctggaactccagggcgcgcacccacggcccccagtccaattcaataaaatcggcgggcccccacagcgcattgccaatcaccacccgcagcgtgccggactcggcgagcgtcctgaccacatcagcgggtttaatcgtagcgtcggccaagtgtttggcaatttcgctgtcgcctttagccggatcgaccagccactgcttgcgccactgcgacgttgtagtggagggactgcacgtgatcaagctgtcctgagaacccgacaggtagcccgtgatacccgagacgagcatgtcagcgacgtcttgcgggtgaaacatctggccgctcaactcggcttcctggcgcgtccatttgaaacgggcaacatagtccggatcagtcttggacaacgcgaggcccgtgccgtaacgggcatgtagccggcaacccgcgtgcagaataatcggcgtgttttgccggtccaccgggtagaggccattgaaagcaaacggccttggccctgtgggcactggttgcgtcaccacaaagcggccgtccgcttgttgaagaatcatcccaccgagtacctgctcgcgacgcccgttgatgtccccgtggataaagcgagcggcgtcgtcggctgacagaaaggcattactcaaggacggcagggcgaaacgcgaataggggctccaattcgtatcgacaacgccactgcggtcccacaatgcgctggttttttccacgctcagttcgccggcagcggccactttgcggacgaagtcgcgggtcagcaaggagcccttgaggagcaaggcttgccagccgttatcggtgacctggccgtcctgcgcctgggcaaacagctgggactcgagcgccgagccggagaagcggtagcgcaagatggcttcgtcccgcagtcggatatacaaagacgcccccagtgtggattgcgccccctggctgtactgacggaaccggacaatgtgctgcgcaagctccagcgggctgatgaaatttttgtacagccagttttccagcgtggggtattggacgggcaatggccgcgaatgaacataaatcccgtgcaggtggtagccaacaggaagctgaggcagcacgcccgccgcctcttcaatcggatccgggtctcgggcgacatattcagtctgcgcatcagagagcaggatcaaggcttgctgacgcagattgggtttgcgctgaatctgcgcagcggcatgcgccagcgtatgcgctatgtccgcgaacaccggccagggtttatagggttcccaattggcggggacccgccccacagaaccgccccaataagggctggagattaaaaacgtgagctgccccaccgacgcgagcttcttgtacaacccttcaagcgtcccatcaaaggcatggggcgactcaaatgccccccgagtggtaatccagtgagcaaagccgtgtgccgctgctgtttcatcaaattggtatttgatcagagtgccgtagggcccggagaggtaagcctccctgaattttgaacggttctgatgattgaagatgatgtctggctctgagtaaaagccctggaaagcggtgacttgatgcgcggtccacaggggattttcacgggtgacccacgcagtgctattgggatgcgtatgccagctggcaacaatgtggtaaccctcagggtccaggtaggcggtatagccggcgtcgctgtccagcagcagatcaaaactgaacacggtgggccggtccgaaatcggctcgctgccaacgaacaggccatccgacaaccgccgcagaatgacgctgccgtactccacctgcaaattactccccacgcgcccgtgaaggtagcgggccacttcatcagcgctggaaaaagccgcgcttagagtgcccagcttggcgtggccacggggaagggttgcgcgtttttcgcgcatgggttggtcgtccataatgaaacctcgaaacagaattgtaggttccgccatcctgaacacccgctgattacgggggggctacatagttagccagcacctcgcaccaagacggtgcctcatccttgctgccacttctgcccagcgcttattcagtgcgccgtcgactgaaagcacccgcagatagcccttgaatacggctgtttccagagcaggcacagcctttgcaaaagacctcgtatctgtccaacaacaacacttgggttctcggagatcgcaccatgaagcgtcgcagcttgatcaaggctttcactctttcggcatccattgccgccatgggcctgacctggaccgtacaggccgccgagaccatcaaggtcggcatcctgcattcgttgtccgggaccatggccatctccgaaacatcgctcaaagacatggcgctgatgaccatcgacgagatcaacgccaagggcggtgtgaacggcaagatgcttgaacctgtggtggtggaccctgcgtcgaactggccgctgtttgccgaaaagggtcgtcagctgctgacccagaacaaggtcgccgtggtgttcggctgctggacctcggtgtcgcgcaaatccgtactgccggtgtttgaagaactcaacggcctgctgttctacccggtgcaatacgaaggcgaagagatgtcaccgaacgtgttctacaccggtgcggcgccgaaccagcaagccatccccgccgtggaatacctgatgagcgaagaaggcggcgcggccaagcgcttcttcctgctgggcaccgactacgtgtacccgcgcaccaccaacaagatcctgcgttcgttcctgcactccaaaggtgtcgcggataaagacatcgaagaggtgtacaccccattcggccacgccgattaccagaccatcgtggccaacatcaaaaaattctcggccggcggcaagactgccgtgatctccaccgtaaacggcgactccaacgtgccgttctacaaggaactggccaaccagggtttgaaagcgacggacgtgccggtggtggcgttctccgtgggtgaagaagaactgcgcggcatcgacaccaagccgctggtgggcaacctcgccgcctggaactacttccagtcggtggagaacccggtgaacaagaaattcgtcgcggactggaaagcctacgccaaggcccacaacctgccgggcgcggacaaagccgtgaccaacgacccgatggaagccacttacgtgggtatccacatgtgggcccaggcggtggagaaagccaagtccaccgacgtcgacaaagtgcgcgaagccatggccggccagacattcgccgcgccgtcgggcttcaccctggaaatggacaagaccaaccaccacctgcataagccggtgatgatcggcgagatccaggctgacgggcagttctcggtggtgtggcagaccgaaaaaaccatccgcgcccagccttggagcccgtacattccgggcaatgacaagaagccggattacgccgtcaagagcaactgatccgaggggtgtcggcactttaggtcgacacaatccctgtgggagctggcttgcccgcgatgctgacaactcggtatgtctgctgcaccgctatcgcaggcaagccagctcccacatttgttcgagcaaggcccacgaatatgcccactgccctccaccgcttcatcctcgccgccctgctggtgctgcccctcgccgcacacgccagcgacgccgaagacttcatcaacgccaacccgatgcaacaagccaagctccttcaggactgggctgccacgcctgacccgacgcgcatcgagttggtggacgccctgcaacaaggccagctcacggtcaacggtgaaaccaaaatcgtacgcctgaacaaccgcctgcgcggcctgatcgacaacgtacaagccagtcagcaactgctcgccgccgaccccaaggtgcgcctggcggcggcgcaaaccctgcaaaaaagcgcacaacctgcgcagctcaaattccttgatcaacaagtcgccgccgaaacaaacgaagacgtacataccgccctcagcctcgcgctggccaacctgcaactggtcgacgccgacccggttgtgcgcctcgccgccgttcgcttgctgggtggcaccggcgacccattggcgcgcacgcgccttgaagcgctgctcgcccccggcgttgaaaccgacgccgccgtgcacaccgccgccgaaaccagcctggcccaggtcaaacgcaaattgatgtttggcgagatcctcggccaggccttcagcggcatgtccctgggctcgattctgctgctggccgccctcggcctggcgatcactttcggcctgctcggcgtaatcaacatggctcacggcgagatgctgatgctcggcgcttactccacctacgtggtgcaattgctgatgcagcgctacgtaccggcagccatagagttctacccgctgatcgcgctgccggtggcgttttttgtcaccgctgccatcggcatggcgctggagcgcacggtgattcgccacctctacggccgcccgctggaaaccctgctcgccacttggggcatcagcctgatgctgatccagctggtgcgcctggtgttcggtgcgcagaacgtcgaggtgtccaaccctgagtggctgtccggcggcattcaagtgctgcccaacctggtgctgccgtacaaccgcatcgtgatcatcgccttcgccctgtgcgtggtggtgctgacctggctgctgctgaacaagacgcggctgggcctgaacgtgcgcgccgtcacccagaaccgcaacatggccgcttgctgcggcgtgcccaccgggcgcgtggacatgctcgcgtttggcctcggctccggcatcgcaggcttgggcggcgtggcgctgagccagatcggcaacgtcggcccggacctgggccaaagctacatcatcgactcgttcctggtggtggtgctcggcggtgtcggccagttggccggcagcgtgatggcggccttcgggctgggcatcgccaacaagattcttgaaccgcagatcggtgccgtgctcggcaagatcctgatcctcgcgctgatcattctgtttatccagaaacgcccgcaaggactcttcgcactgaaaggacgggtgatcgactgatgaaccagccattgatgcttactgccgcgcaaaaggccggccccaaggtcacgattgcagtcggcgcgctgatcctcgtcgtgctgctggcgctgcccttgctgtcgttgttaccgccggacaacgcctttcatatctcggcctataccctgacgctggtgggcaagattctgtgctacgccatcgttgccctcgcgctggacctggtgtggggttacgcgggcatgttgtcgctgggccacggtttgttctttgccctgggcggctatgcaatgggcatgtacctgatgcgacaggcctccggcgatgagttgccagcgttcatgacctttctgtcgtggactgaactgccctggtactggatgggcaccgaacacttcctctgggccatgtgcctggtggtattggcacccggtttgctggcgttggtgttcgggttcttcgcgttccgttcgcggatcaagggcgtgtatttctcgatcatgacccaggcgctgacctttgccggaatgctgttgttctttcgcaacgagaccgggtttggcggcaataacggcttcaccaattttcgcagcatcctgggcttcggcatcaccgaaccgggcacccgggccgtgctgttttttgccacggtggtgttgctggtcaccagcctgtacaccagctggcgcctggcgcagagcaagttcggccgggtgctgaccgccctgcgcgatgcggaaaaccgcttgatgttctgcggctatgacccgcgcggtttcaagctgttcgtgtgggtgttgagcgcagtgctgtgcggtttggcgggtgcgttgtacgtgccgcaagtgggcatcatcaaccccagtgaaatgtcgccgaccaactcgattgaagccgctgtgtgggtggccctcggcgggcgcggcaccctgatcggcccgttgctcggcgccggcgtggtcaatggcatgaagagctggttcaccgtggccttccccgagtactggctgtttttcctaggggcgttgttcatcatcgtcaccctgtacttgcccaagggcatcatcggcctgctgaagaaatgaggaacgtcatgctcgaacctattctcgatgcgggcagcggccgcgacgccatcggcattggccaggcggccggcaagggcctgaacacccgccacggcaccatcctgaccctggaagacatcagcgtcagcttcgacggcttcaaggcgctcaacgacttgaatctctacatcggcgtcggcgaactgcgctgcatcatcggccccaacggcgcgggcaagaccacgctgatggacgtgatcaccggcaagacccggcccagtcacggcaaggcctggtttggcgaaacccttgacctgaccgccatgagcgaagtgcagatcgcccaggccggcatcggccgcaagttccagaagcccacggtattcgaggccctgagcgtgtttgaaaacctggagttggcgcaaaaaaccgataaatcagtctgggccagcctgcgtgcacgcctgagtggcgagcagaaagaccgtattgatgaagtgctcgacaccatccgcctgacgacctcagcgcagcgcccggcggggctcttgtcccatggccagaagcagttcctggaaatcggcatgctgctgatgcaagacccgcaattgttgctgctggatgaacccgtggcgggcatgaccgacgccgaaaccgaattcaccgccgaactgttcaagcgcctggcgggcaagcattcgctgatggtggtggagcacgacatgggttttgtcggctcgattgccgaccacgtgaccgtgttgcaccagggcagcgtgctggccgaagggtcgctggagcaggtgcaggaaaacgagcgcgtcatcgaggtgtacctcggtcgttaacgctgacacaggctgctttatgtgggagctggttccaatcagggaattgaggagaagttgaacatgctgcaagtcgacaagctgcaccaatactacggcggtagccacatcctgcgcgggctttcattcgacgtgaaagtcggcgaagtcacctgcctgctgggccgtaacggcgtgggcaagaccacgctgctcaagtgcctgatgggcctgctgccggccaaagaaggcgcagtgaactgggaaggcaaggccatcaccgggttcaagccgcaccagcgcgtacacgccggcatcgcctatgtcccccaggggcgggagatttttggccgattgaccgtggaggagaatttgctgatgggcctgtcgcgcttccccggctccgaagccaaggaagtgcccgccttcatctacgagctgttcccggtcttgctgcaaatgaaacatcgccgtggcggtgacctgtccggcggtcagcagcagcagttggcgattggccgcgccctggccagccgcccgcgcctgttgatcctggatgagcccactgaagggatccagccgtcggtgatcaaggaaatcggtgcggtgatcaagaagctcgcctcacgcggcgacatggcgattttgctggtggagcagttctacgacttcgccgccgaattggccgaccagtacctggtgatgtcacgcggtgaaatcgtgcagcagggccgaggtgaaaatatggaaagcgagggtgtaagagggctcgttacgatctaatctgtgacgtcctgagcctaagcacacaccatgaaccagcccgctatccccgccctgttcgcccccagctggcacgccgagctggaactcggctacgcgcgtttcggcgataccacacgcccggtgatgcgccgccaccttggcccgctgcgggtgcaaaagcacctgtacgccgaaggccccgaggtgtgccagcacatcatcgtgcacccgccaggcggcattgccggcggcgatcgcctggacatcagcgcccacatcggcgcaggcgcctgggcccaactgaccagccccggtgcggccaaatggtatcgcgccaacggcccggcctatcagcagctcgagctgaccgtggaggccggcgccaccctggaatggctgccccaggaaaccatcgtgttcagcgccgcccaggccgaactgaccacgcgcattgagttgcaaggcgacgcgcggctgttctactgggacgtggtcgccctcggccgcccggccagtggcgagcgtttcgacctcggccactttcaatcgcacctggacattcgccgcgacggccagttgctctggcatgagcgccagcgcattgtaggcgccgacggcttgctcgactcgccgatcgggctggacggccagccggtgtttgccaccctgctgctgacggcggatatcgagcctgaattgcttgaacaatgccgcgccctgccccacggggtgcgaggcgacctgacccaattgccgggcttgctggtggcccgctgcctggccagcgaagcgttgcatgctcgaggttggttgattgatttatggcggcttttgcgcccgaccgtacttgggcgggaagctgtctcaccccgaatttggagcacatgaagatttgaagtggaacctgccctctgtgggagctggcttgcctgcgatgcagacgactcggttaaacaggacactgagttgatgccatcgcaggcaagccagctcccacattggatcttcggtgtttttatgaatgttgtttgaaggacctgaaccatggatttgaccccacgggaaaaagacaagctgctgatcttcaccgccggcctggtcgccgagcgccgcctggcgcgcggtgtgaagctcaactacccggagaccatcgcctacatctccgccgccctgatggaaggcgcgcgcgatggccgcaccgtggccgacctgatgcacttcggcaccaccctgctcacccgtgagcaggtgatggaaggcatcccggaaatgatcccggacatccaggtagaagccaccttccccgacggcaccaagcttgtcaccgtccaccagccgattgcgtgaggcgcggccatgattcgtgacgcaacccaaagcgatttgccggcgatccgtgatatctacaacgacgcggtgctgaacaccacggcgatctggaacgaacaacccgtggacctgggcaaccgccaggcctggttcagcgcgcgccatgcgcagggttatccgatccttgtctcaatcgaaaatgaccaggtcaccggctacgcctcatttggcgactggcgccccttcgaaggtttccgctacagcgtcgaacactcggtgtacgtgcgcaatgaccagcgcggcaagggcctcggcccgcgcctgatgcaagcgctgatcgaacgcgcacgcggctgtggcaagcacgtgatggttgccgccatcgagagcggcaaccaggcctcgatccgcttgcatgagcgccagggctttatcaccaccgggcagatgccgcaggtgggcatcaagttcggccgctggctggacctgacctttatgcaactgacattgaatccgggcgccgaaccgcccaaggagtgaggtcgatgaacgccgcgcaactgcgtcgagtcaatgctgaaagttttgcccattaccgcctgggcttgattgagctgttgctggacgcggtgaagcacggcgcttcggtcggcttcatggctgacttcgacgaggcccaggcacgcacctacttgaacggcgtgcaggcgagcattgaagacgccagcctgctgttgtgggtcgtggtacgcgatgaacacgtgattgccagcgtgcaattggcgctgtgccagaaagccaacggcctgaaccgcgccgaggtgcaaaagctgctggtgcacagcaacgcgcggcgccatggcctcggccagcaattgatgaacaccctggaactcgccgcgcgccagcacaagcgcgggctgctgtacctggacactgaggccggttccggcgccgaagccttctaccagtcactgcgctacaccaaagtcggtgaactgcccgactattgccaaagcccggacgggcgttacaccccgaccgccatctacttcaagaccttggggcaacctgcatgattcctggtgaatatcagattcagccgggcgacattgaactcaatgtcggccgacgcactatcagtttaagcgtggccaacagcggcgaccggccgattcaggtgggctcgcattaccatttttttgaaaccaatgacgcgctgacgtttgaccgcgcggcgagccgtggcatgcgtttgaatattccggcggggacggcggtgcggtttgagccggggcagagtcgggaggtggagttggtggatttgagtggcgagcgccgggtgtttgggtttgccggccgaatcatgggcgacctttagggcctcatcgcaggcaagccagctcccacatgggactgtgttcacacatttggatgtgtgaataccgcccaatgtgggagctggcttgcctgcgatagcgatttcacattcaacacacatttttcagggcacgcacacatgaaaatcacccgccaagcctacgccgacatgtacggccccaccgtcggtgacaaggtccgcctggccgacactgaactgttcgtcgaagtcgaaaaagacttcaccgtctatggcgaagaagtgaaattcggcggcggcaaggtcatccgtgacggccagggccaaagccaactgcttgcccacgaagtcgtcgacaccctgatcaccaacgcgctgatcatcgaccactggggcatcgtcaaggctgatgtgggcctgaaaaacggccgcatccacgccattggcaaggccggtaacccggatatccagcctggcgtgaccatggccatcggcgccagcaccgaagtgatcgccggtgaaggcatgatcctcaccgccggcggcatcgacagccatgtgcatttcatctgcccgcagcaaatcgaagaggcgctgaccagcggcgtgaccaccctgatcggcgggggcaccggcccggcaaccggcaccaacgccaccacctgcacctcgggcccatggcacctggcgcgcatgctccaggccagcgactcgttcccgatgaacattggtttcaccggcaagggcaacgccagcctgccggagccgttgatcgaacaggtcaaggccggcgccatcggtttgaagctgcacgaagactggggcaccacgcccgcgagcatcgataactgcctgagcgtggccgacgaatacgacgtgcaggtggcgatccacagcgacaccctcaacgagtccggtttcgtcgaaacgaccctggctgccctcaagggccgcaccatccacacctaccacaccgaaggtgccggtggcggccacgcgccagacatcatcaaggcctgcggcttcgcgaacgtgctgcccagctcgaccaacccgacccggccattcacccgcaacaccatcgacgaacacctcgacatgttgatggtctgccaccacctggacccgagcattgccgaggacgtggccttcgccgaaagccgcatccgccgcgagaccatcgccgccgaagacatcctgcacgacctcggcgcgttctcgatgatcagctccgacagccaggccatgggccgcgtcggcgaggtgatcacgcgcacctggcagaccgccgacaaaatgaaaaaacagcgcggcccgctgcccggcgacggcccgggcaacgataatttccgcgccaaacgctatatcgccaagtacaccatcaacccggccatcacccatggtgtgagccatattgtcggctccatcgaagtcggcaagtgggccgacctggtgctgtggcgcccgccgttcttcggcatcaagccgaccctgatcctcaagggcggcgcgattgcttccagcctgatgggcgacgccaacgcctcgatccccacgccgcagccggtgcactaccgcccgatgttcgccagcttcggcagctcgttgcacgccaccagcctgacctttatcagccaggcggcccaagacgccggcttgcccgaagccctcggtttgaaaaagcagatcgcggtggtcaagggctgccgcaacgtgcagaaaaccgacctgatccacaacgattacctgccggatatcgaggtggacccgcagacctatcaggtcaaggccgacggggtgttgctgtggtgtgagccggccgaggtgttaccgatggcacagcgttacttcctgttttaacccccgtgttcgctggccggaggaccgggctggggattttcttccagctcggtcgtggtcaacagctcgatcaacccggcttcggcaacgcccagttgcccttgcaggctctgcgcctgagcgtcgtagtcagcgcgagacagcccgcctgcgtcaacctgctccgagagctgcgcgagctgttcatgaaagggtttgctcagcgcttcgaactgcgcccggtgcttgctggtgacgtagtctttccagaagtcgcgggacaacagagcctgaaactcctgcggcgagttgttcagcgccaggatgcgtgaacgggttgcgtccaggtccgcctggctgacgcgccccagagacagaaaacgcgcctgatccggttggccgggcaaatccagttggtccttgccctttagcccgtaacgataggccaggcggatctcgacctcttcaagcaaaccaacctgcgtacgccggttctcggccgaaagattcggatccgcctggatagcgtttgtacggttggcgatgtcttccagggcggtcttttcaacctcgtccaggcggaacaaaccccgtgccagtttcagcaatgtcgtgccctgatccagctgcgtggcagaggccttggcgcggtagaccatttgcatgatctccaggttgctgaacgacaatgccgcacgatcacagcatgccgcgcgcccagcccaagtgaacatttcttcgcgcaaggcttcggactcggcattgggctcggtgatgctgtcaatcacgtcccacacgcgtcgttgcaggtcttcatggcctttcgggggcgtgtccatatccgccagcatctggaaaaaaccctcgctgccggtctgatcacgcagggtgatccactgggtggtccttgcgcccacttgctcctgagtcaacccctcggtccagcgctcgaactgcgtacccgggagcctgaccaccacgggcgagcgcaagcccagcgccgtggccgtcaggcgcagaggtcggttgtcgtggagaaagccgtcccgttgcagacgcgccgaatgctcacgcacctgttgcaaagtggcctcagtgaacgggttgttgctcacgcgggtgatggagaataaacgagcggagcgcgccatttgatcatccgaaggcgcgataagatcggcgggcagagtgctcagttggttattgctcaagtcgatctcatcgagcaaaggttgcacacccagcccgtgcggccaatggtcgatatccgttgcgcgcaggcgcaaagagcgtatgtccggtatctgactgaaatccggcaccacacccaggggattgccgtccatccatagcgctctgagggtcgtgcgttcggacaggatccgagcactgtcaacggtcaggcgaatttggttgttgtcgagaaacaagcgggtcaaaccgtgcatctcgcccacggctggcggcagttcacgcagttggttatctgagatatcgagccagcgcaaaccgcgaaagccgctcaagaagccctcaggcgaggcgctcaaattcatgtgagtgagcttgagcgaaccgacatggctgaagtccgcgtccaggtccggaatgctgggcagcgtcaagtcactgaggttcaactccagtccgaagggtgtgccgtcagcggctagtttttgcggagtttcccggcgccagcacgccaggatccgggtccgggccatgctgcggtcgtcacgttgcgcaaggttttccaataccctgttcatacgcatgtaacgctgatgcgtgcctccacccgaaaagacccagccatcaagttgctccttgagcctggtgtattcccgggtcaatcgggccagctcggtttctgccccggcccccaggttccagatgtattgccggcattggccgatgtcgtaattggggtacatgcgccgcacttgggcaatcggcggggtctctactgaaaatctgtcaccgcgcccgttctccagcatttcgggatgggtctgggacaggcgctgccagtaactgtccagcgcttgctcggcgtcggcagacaagtgattgccggtcatcgaggtggccccgttgatcttgatgattttttcggcgtgttccggggccggctcaaggtgctcaacggggatagaacgcagtcggttatctcgcaggttgaggtcctgcaaatccgattgttcgagcaatcctgtgggccactgttcgagctctgcgcagcttaagtccacatacttcaagtgaggcatgccactgaaatcaggggccaggtttagcgggttgtttgccaggtccaggtgctccaattggctcaggcgccccaattgctccctcccctgtatcgtgagtttgatccggttttcccgcagactcaggcgggtgaggttgctcatctcacccaacccttcgggcaattcggtgagggccgcgccgcggatacgcaatcgcgtgagttgtttaaaattgctcaggaaggtttgggcgtcgcgggtccatggcgtgttgatcagctccagctccctgacatggctgaagtcggctgtcagcgcaggcaaggtcaatggatggccggtgttgatgctgagggtgtttgtctcccggcgccagcagcgcttgatcgcgtcggcatacgttttgacgaacccgccctgacggtcaaaagccgtggtggtcaccggcggggcgttgtccctgacccagtgtttaaggtctcgtttgagcgtcgtgtactcgcgctccaggcgcgacaagccgctgcggacctccgtgccctgggaggcgatgaagctggcgacctcatcatcggtccaggtcgggaacagccgacgtacccgcgccgtcggagcgcgaaaggcattcaccgcagtacttgccatgtgccgcacaccacgtccgccaccgagcaaacgcatcgaagggtcgtaggctggtttgcgcagcgggtgtgcctgcaattcaacgcgctggctgtcgcgcgtgcgatcaccgagggctcgcaggcgctgagtgtcggtattcgccaatgactcgacaaacaacccttcacgtgcgcgggtcaggcgcagttcctgggtttgccaccgagcctgctcaatcacgttggccggtagctcgccagcgcggcgaaaactgcgcaatggggcgtcgccgaggttcttcagcaagtgctcggccatggggccgggcaagttcgggaaccgggcctgcaggcgcgtgacatcggggttcaggctgatgttctgagctttgtagcgctcctccaccaacgtgctttcagatgcctcggcttgtgcacccaggtagtggcgcaacacccgggcgcgctcggccaaggactcgctgggctggccgggaaactcgcttaaagcaggatcatcgacacgcaggtaatcgagcacctcttgcagcaattcaccacgcgcctgcgcgccgtccggcagcactaacgcatggcgcgcctgtgcaggtaataccggatcactccagagttgtttaccaccgcgctcaagtaacacgtacggcgtatccggcagcatgccgcgtcgtcgtagcaaatccatttggagcgccggatcggccttggcgtactccgcgacatcggctgacttcatctgcgcgataaaagctgccagctcatccgccaccttgaagcgttgcagcgtatcggccagagcgagtggaatcggttcctgatcgagatgccccgcgcgcaacgcatcggcttcaacgccgctggcctcgcacgcctgctgcacacgttcggcgctcatgccctccaccggcttacccagacgccgcagggtagtcgcgtcatcccaggtcagcgggtgttcaacctcgtgctgccaggcaccttcatggttatgctccaggcgtggagtgtaggcctgcgcacgtgtcgggtgctggatacggtgctcaccctcgatcgggtcatgccgcacttcaaagtgatcgccctccagcggcaacaccgtttgcccttcatgggcatataaccccagcgcatccggcgtagcgtctgccgccagctgtaccggcaccttgtagggtgccaggtcggctttccacagtttctgctcgccgccgggagaggtgacgggctttagcgactcgatcactggcggcgtactgagcactttacgcgccgccacgccacccgctgccagcacgccgataaaggcgatattttccgcaacatcagtcaaatgccccagggccgcctctcggtcgccctcgtgccactcgaccacaccttcgaaagtctcgtagagcaactgcgcggccatcaccgccatcatcacttcgcccaggcccggcacgaacattgacaccaggttcaacgccaacagcccggcgctttcaagagcctcgattttcttcgcccggaccgctgcatccacatccgccgtaggcacggcatggccacgtgcgtcagcgatcagcttatcgcgcagcttttcgaagttgtccccccagagttcaacgttctcttgccacagttcgcgcttggcgatcacctggacgtaaaagttcggatccttgatcggttcgcgcgcagtgggagccggtggcaattgtttgggtccgacgaacaccgagatgatcgccgagacaaacggcaatacgtactgccccacccgcagcacgacataggggtcgcgtggctggtcggaggcttcctgggtcaggcgacgcaggtaggtcggctggtcggcataggccacgtaattcttgaggaaccgttggtacgcgctgaggccactgccggcggctgtgtcggccatcaattgacgggtcagttcagcctgcaaatcttgcaggctggcgtactttttcagcgggtgctgcgggtcgtgggggatatacaccagtacttcgcgggcatgctggtttttttccaccgccacgaacgccgtgcagcccgacagacgcaagcccatcaggctgacgtcgttgaaccagaccggcttgccgtcatcgcgaatctctttctggcccgcgatcaccgcgctgattacggcatagtcacccgccccgatatcctgcttgagcagcgcggtgtaggcggcagcctgcaaggcgtctttctgagcctggatcacgagggcgcgcaggccggtggttctctggaaaaagtcggtgaggcacgcctggtattgcgcgccaatatccaggcgacgacacaggctcaggaagctagcgatgctcatccccagggtcacgctggcgtcagtttgacccggcccgcttttgaaccgcgacgacggagtaaacgcgccgggcgcgcattcactttcttcgaagttatgcagggcggcttgaagcaagctcagggtcaacaccgaaaaactaccaatgcggatcccgagcacccccaactcaacggggttgcgcaggtccacgaacgtgccgtccaggtcgggctcgatatcgaactgctgcttgatggccgccgccagcaacggcctggcaaaagcctcgacgctgggcaggccggccatggtctgatcgaggcgattttgcgactgtgcgctggcgctggtgtactcctgcaactgctgtcgcttgctgccgctgaggctggcgagccaatcaaccgcatgggtcggcgcggccctgaaggcatcgcgggtggtggccgatgcctgggtcaaccaggcgggcactttctgcttgatgatctcgaaggccggggtttgcggttcgaggtcgggtgtatcaacgggcatggtgacgactcactgattcataagagtcgtcagcagaccatgcccggcagtgcccactgcggtaggtagttaacccgtgaggcgggcggggttagaaattttcacgcggattgaaagccgccttcttcgccagttcctgccacagcgcgatggtctcgtcatcggcctgcttgggcattaccgccttgagctggatgtacaggaaaccgcgctcacccgctttgttcagcaggccatgccccttggcgcgcatgcgttggccgttctggctgccggcgggcaccttgaggttgattttgccggtcagggtcggcacggccacttctgcgcccagtgccagttcccacggtgccagcggcagagtgatcaccaagttctcgccctccacttcgaacttggcgtgcggggcaaacttgatgatcaggtacagatcgccattggccccaccgccaatcccgggcgcaccctgcgctttgagacggatgcgctcaccgtcagccacgccggcggggatcttcacgttcaggctttttgtggtgttgctgacgtgacggcccgaggcgtcgtattgcggcacctggaagctgatctgtttggactcggccgacagcgtctcctccagagacacggtcaattgcatctcaacgtcctgccccttgcgcccggcaggacggcgctgaccgccgccaaaaccgtcgccgcgcgagccgaatatcgagctgaagaagtccgagaagtcgccctgatcctgcccgccgccgccaaagccgccacggctctgccaacccggcggcccctggaatggctggccgtgttgaccgtatttgcgcagctcgtcgtattccgcgcgcttatcggcgcttttaagcgcttcataggcttcggacgcgtccttgaatttctcttcggcgtctttttccttgctcacatccgggtgatatttacgtgcgagcttgcggtaggccgccttgatttccttgtcatcggcgctcggctctacgcccaatatcttgtagtagtctttgaaatccatcggtggttcaccatccctaatcgagatcgcacagcccggggcacaacgtgcggtgcattgcacttgttgaatgaagtggcccgggggtgcgtcaaagtgttatcggcgcttgccgtatgcagcagatgtgggggcgaatcaccaggtttcaaggaagatttaacagatggtcggcctacgcatccgcccccgactggcatacactgcgcggccgtttttcaaccggaacctgattgtcatggaaaacccatccccagcccgtgcctgcggcatcgactttggcacgtccaactccaccgtcggctggatccgccccggcgaggagacgcttatcgcgctggaggacggcaagatcaccttgccgtcagtggtgttcttcaacttcgaggagcgccgcccggtgtacggccgcctggcgctgcacgaatacctggaaaactacgaaggccggctgatgcgctcgctcaagagcttgctgggttccaagctgatcaagcacgacaccagcgtgctgggcacggccatgccgttcaccgacctgctggcgctgtttatcggccagctcaagagccgcgccgaagccaacgccggccgcgagttcgaggaagtggtgctgggccgcccggtgtttttcgtcgatgacgacccgatggccgaccaggaagcggaaaacaccctggtggatgtggcgcgcaagatcggcttcaaggacatctcgttccagtacgagccgattgccgcagcgtttgactacgagtcgaccatccagaaagaagaactggtgctgattgtcgacatcggcgggggtacctcggatttctcgctggtgcgcctttcgccggaacgccgtcacaacgacaaccgccaaagcgacatcctcgccactggcggcgtgcacatcggcggtactgacttcgacaaacagctcagcctgcaaggcatgatgccgttgttcggctacggcagccgcatgaaaagcggcgcctacatgcccaccagccaccacatgaacctggccacctggcacaccatcaactcggtgtactcgcaaaaatcccagctggccttgggcagcatgcgctacgacatcgaagacaccggcggcatcgaccgtttgttcaagctgattgaacagcgcgcgggccactggctggcaatggaagtggaagaaaccaagatccagctgacccacgaagacagccgccacgtgctgcttgaccgggttgagccgggtttgagcgtggaactgagccgggcgctctttgagtcggcgattgatggcctgctcgagcgcgtgcgcggcagtgtcacgcagttgctcaatgacgcaacggtgagtgtcgaccaggtggacacggtgttctttaccggcggttccagcggaattccggcgttgcgccacagtatttcggcgatgttgccaaatgcgcggcatgtggaaggcaatatcttcggcagcatcggcagtggtttggcgatcgaggcgagcaagcgctacggcagctgacctgccccgatttcacccgcacagaaaatcaaatgtgggagcgggcttgctgtggcgagggagcttgctcccgctcggctgcgcagcagccgccagcttttgggggcgcttcgcaccccagcgggagcaagctccctcgccacaagagcccgcacacatttagacctgcttacacctgatacccgctgcgcagaacatagcctaacggtgatagatcatccaaaggcccatcagcgtcaggcaccacatgaccgcgccgggcacaatcaccaggcagttccacaggttaaagcgagcgttgctctgcccctcgggatcgcctgcggcgaagttgatcaggccctgggcttgcgcaaggatgtaggcacacagaggaacggcgaggatcgccaacggtttgtaatacagccagctatcgatccggttagcggccacctcgaaaagcctggcaccgacggtcaccaccacaaacacggtggcccactgctcgaagtcaaaatcgaattttcgaccgctgcgggcaatgcggtcatcagcccggcgatagagctggtgagtgaaaaaaataaagaacatcgcccgcgccaagggccagatatccagctgatgggctttcttgtacaagctccagtttttatacgcccagatataggtataaagcccgaagctgagcaggctcagcaccagcagcttgttttttgaaatgacgtaaaactcggaagacgtctttaccgtctcggtcaactccgccgttggcggagcatagatattgtcgctcaccgcttgttgccccttaagtccctttaacgttcgcgtgattgcgtcaaaccattccggcgagcttgagctcactcttcagatacgcatagtagatcgggcctgccaccacgcccggcagcccgaatgcggcttcaaacaccagcatcgccagcagtaattcccacgattttgcactgatctgcccaccgacgatgcgcgcgttgaggaagtactcgaccttgtggatcacgatcaagtagcccagcgccgccacggccacccagatcgacagcgacaacgcgacgattgtaatcagcgtgttggacatgaggttgccgatcaccggcagcaggccgagcaggaaggtcagcacgatcagggttttggtcagtggcaggtgaatgccgcacagcggcagcaccacggccaggaagattgcggtgaaggcggtgttcagcgcagcaatcttgatctgggcgaaaacgatgttgcgaaaggcctggaccagcaggtgcaggcggtcgaacagtgcagcggccaagggtttgcgcttggtcaggtcaggcactcgctgcagggcgatgatggcgccaagcaccatgccgatgagcaaggtcacgaacatgtgcgcggcatctttgccaacaagctgcagttcgctcaagtgcttgcttagccaatcgccaatcgccacgcgaaactcggcagcgctggccggcaggtaggcgtcgatgaacggcggcagctggccgcgagcgcggtcgaccacgcccatgaatttgtcgagggaagccccggggttttccgcctcgtggagcaggaagctgatggcgccggcaaaaatcagggtcagcacactgacaatcaaggtgcccagcaaggccaccgccagccaccgcgcgcgacggccttcgatcaggcgctgcaattgcggggtaagcatgttcaccagctcatacaccaacagaccggccagcaggctgggcagcagtttgagcggaaggacgagcaataacccaccgaaaatgatgatgcaactgaccagcaacaacacgtgacgctgcgaaaacgttggcatacagcctcaaaacgaacggcgctaaaggatgggcagtctgccagccttgagggaatcaagcgagaggtcaggtttggaatgcgatcaagtgtgagcgctaacctctgcgggaggtggcttttgtgggagctggcttgcctgcgatgcaggcacctcgatccagaggaagaccgaggtgcctgcatcgcaggcaagccagctcccacccaagcccgctcccacagggggctcgcgtgtttagctacctttgaggcaggtgctcataaaggttttacgcgcatcgccggccagcgccttggtttttgccgacgcattgcagtctttcatcttctgctgctgcggggtgagcgtcttggcgtcgttggccgcaggcgccgacaagcaggtcttcataaaggctttacgatcatcgcccttgagcgtcttggtggttgcctcggcgttgcaggtggtcatcttgttttgctgggcggtagcggcaaagccttgcgaacacagcagcagacccatcatcaacagcggaatacgcagcatcttcatggagttttctccctgttaccgtgccgaaagggcacggcctacacgccagtgtagtcaaagcctgttacatcttcaccggctgcgaatattcgaccgacggtactgctccggggtacagcccgcgtggcgctggaacatggcgatgaacgctgaggcggtgctgtaaccgaggtcgaacgccacgtgttgcacgctgcgttcgctgtccagcgcctcaatggcggccagataacgcaagcgctggcgccactcgccgaagctcatgccgacttcccgcacaaactggcgagccagggttctttcgctgacatgcacctgctcggcccactgcgccaaaggccgattgtcgccgggttcagcctgcatgccttccagcacgcccagcagccccgggtggcgggcatagggcaggaagcaatcgtgaatcggcgcttgcttgagttggtccaccagcacctgggccaggcgaatatccgcctcggtctgcgggatattgacgtctcggcgggcgaagtcgctgaggatggccttgaggatttcgctgatcgccaaggtacacggcgcctgcggcagtcgctcgcagagctccggcgccaggcccaccgagcggtagacaatcgcttgggcgttgtaggagctgtgctcggtgttcggcggaatccataccgcgtactgcggcggtgacatgaagcggctaccggccacttccatgcgcatcacgccattggccgaatagtccagcgagccccaaaagtgttggtgcggcgtgcactcggtgtcgggggcaaaatccgagtagcgaaagtacacagggctcggcaggctggggaaatccgcgaggcgtacggtgtatctgggcatgttgtccggttctagaggtcgtttgtctggatcgcagtataggcttccatccagacagaggataatcgcgcctcatcaccctatctggtttctatcgatgcaatacgcataccccctgctcgccatttttatctgggccggcaacaccgtcgtcaacaagctcgcggtgggctcgatcttccctgctgaaatcggcttctaccgctggctgctggcggcgctgctctttaccccgttcatgctcaaaccggtgcttgccaattgggcgctgattcgcccgaacctgggcaagatcttcattctcggtgtgctgggcatggccatttaccagagcctggcctactacgccgcgacgctcaccacggccaccaacatgggcatcatcctctcgctgatgcccttgatggcgctgacggcggcgatcatcagccttggccagcgcctgactttcggcgcgttgaccggcgcggtgttgtccttcgccggcgtggtcgtggtggtgtcggccggcagcctcggcgccttgctgcagcatggggtcaacctgggcgacggcatgatgctggtcgcgaccctcgcttacgcggtctacagcaccctgctgaaaaaatggcaattgcgcctgccgccgctggtgctgctgtatttgcagattctggtggcggtggtggtgctgtttccgctgttcctgttttcggcgaaagcggggctgggctgggcgaatgtcccgttgattctgtacgcgtgcttgctggcttcgatgctggcgccattggcctggatgcattcgatcaagaccctggggccgagccgcaccacgctgtttttcaacttgctgccgttgattactgcgctgattgcggcggtggtgttgaaggaagaattggcgatgtatcacctggtcggggggttgctgacgttggccggggtgattttgtcggagcgctggactacaccggtccgccgcgaggtcagtgtggcctgatacaccgctatcgcaggcaagccagctcccacactagaccgcgttccagctttggaatgaggtctagtgtgggagctggcttgcctgcgataaacgataatgcggtcccctggctaaaccccggcagccttcaaccgctgcgcatgctcgacaaacaacctgatcggctccgcccccttgcccaccagccccaatgactggttgacgatatcgaaatggtccagcgcgtagtcatcaccaatcaccacgcccaagtgtgaactgtaacgcccgaccatgccgtcgcactggcccctctcccgtacgaagctgcgggcgaacaggcggcaactgcggtgcgtgccgtcgaacaggttacgcccacggtcggtgatacccggctgcaaggtgccggaccaggagtaatagcgcacgccgttgacctcttccgcgccctgcccgccccatgtttgcggcaggccttgagggtattcgcgattgaacagcgccacgcctgcgctcgtcagtgaatggtgcgacgcctgcaaatcggccttgaagcgcggcccgcgatagccggtttccagcagccccatcacccacgcaaccccatggaacaccgcactcatgagccggcctttcacgctatctgccggataatgggcatggatatggtccgccagctccgagccatggttggggccggccaccgaagtcaccgacgcgacccagtccgggcgcttggctgccgcataccgcgcggtcagcgcgccttggctgtggccgatcaggttgaccttgtcggcgccggtctcgcggcgaatccgctcgatgtgcaccagcaattgctcgccacgcatttcgctggaatccagcggcgccacctgcacgggaaatacctgcgcgccccccgcccgcagcgccggaacgatgccgtaccaatagggaaacaaccccacgcgcacgaaccccagcatgccgggcaccagcaccaggggataacgtgtggcgagggcatgcggcatggggcggctgtcctgggttgaaaagcgatggatccatcctagaccagcgtttcataaatcgacatgaccaccccgtgacagactcatgacaccttaaaagccgcccgcaaagtcatgcagttggcgttcggcctcttcacaggagcgctgaaatacgcttttgtccgactcttcaccttcggcggcgatcacactcacgtcgtcgatgccgatgtagcccaacaccgtgcgcaggtgcgggtcggcgtggttcatccattcaaactccccgcccggcccgaagccgctgccgccgcggctggtgatgatcaacgcctttttgcctttcaacagcgcctgatactgggcaatgccgttgctgtcctgggtgatatcgaaggtcaggcccatgcgcacgatctggtcgatccaggccttgaggccgctgggcacgccgaagttgtagagcggcatggcgatcaccagcagctcatgctcgatgagttcgccgaccagttcatcgctcagttgcaggtcggccttcatcaccttcggcagggagtgcggttcggggtagaaattcgcggccacgaaggcttcggtcacatggggaataaacgctcggccgacctcacggcgggtcacctgagcgtccgggttgatggcctgccaggcgtcgagaaacgactcggccaggcgccgggaatgggaacgctcaccgcgcgggctggcgtgaatcactagcatttttttcatgtgtatatccttgacgagttagactcaggcggcctgaatggccatcgttcttgctcgccaatctagagccgggcctcgaggccgacaaatgagcaatagttgatcggagtgaattcatttcacctgtggagcccacatgtttgccacgctgcccctgaccgccctgcgcacatttgaatccgcgtcgcgcctgctgagctttaaagccgccgctgcagagctgtcggtgacgcccacggcggtgtcccatcagattcgcagcctggaaacctggctgggcattgccttgtttgaacgcctgccgcgccaggttcgcctgactgaagggggcgagcggctgtttcaaagcctgcacggcgccctgctcgacgtggcgcacagcctcgacaccctgcgcccgcaacgcagcgcagggcagctcaccgtgtccaccacgcccgcgtttgccgcgctgtggctggtaccacggctggggcgtttctacaccgcccaccctgacatcagcctgcgcttggacacccgctgcgaggtggttgacctgcagcaggacgccagcgtcgatctggtgattcgctacagcctgggggattacccgcacctgtacggccagtgcctgttcgacgaatcctttgcggtgtatggctcgcctgaacaggtcgcacgggccggcgcccaggtgccgacgctgatcagcgtgcgctggcacaactccgacctgtacgccttgggttggcaagcctggtgcgaaaaagccggtgaaacctggctggcccacacctcactgctgcgcgaatacgacgaagagcactacgcgttgcaagcggcgattgccggccaggggctggtgttggcaagcaatattctggtctcggaaagtgtggcggcgggcctgctggtgccttaccggccgcaggtgcgcgtggacggcgccggttacagcgcgttgtgcgtaccgggccgcgaacgccacccgccggtgcgcgcgtttttccaatgggtccgggaggaagcgaagctgtccggccatgcactttgaaatccgataaaactttttgcgtcagccaacactcacaacttggagcgatcacgccggcagagcgtggcgcaaaaccggattagcaccaggagattgagatgactgaagcacacttgactgacgttgcgaccctgcgcagccgcgcccgccagaacgtcgaaaatggcgccgtcaccgaaggctacgacgccgaccgcaaagaaatcatccgcctgctcaacgagtcgctggccaccgaactggtctgcgtgttgcgctacaagcgccactacttcatggccaccggcctgaaagccagtgtggccgccgatgaattcctcgagcacgccacgcaggaagccgaacacgccgacaaactggccgagcgtatcgtgcagttgggcggcgagccggaattcaaccccgacctgttgtcgaagaactcccacgcgcaatacgtcgcgggcaagaacttgaaggaaatggtctacgaagacctggtggccgagcggatcgcagtagacagctaccgcgagatcatccagtacatcggtgacaaggacccgaccacccgccgcatcttcgaagacatcctggcccaggaagaagaacacgccgacgacatggcggatattctgcaagacctgtaatcagccacaccgcaataccccatgtgggagctggctggcctgcgatagcatcactgcggtgtgactgacacaccgaggtgtcgctatcgcaggccagccagctcccacatttttggctgtggttttgtcagttagccttttacagtcttcggcgccttgccttccttcatctgttgcagcagcggcgcacactggttcggctcatcgccactcggggccaccagcgcgagcaagcccgccgccgggcctgcgatcacacccagcgccaccatgcccgcacctcgcagcatcaatggcaccgctttcacaccggcattgggcttgatgaacggcccgttgacgtacaacggcgaacgcagggaaaacaggcgaaagcccttggattccggcgtgatggtcaggtccagttgctcgctggccatattcgctgtgccatcgatatagataatcgcgttctcggtatcgaacacgaacaaacgtgtggtcgccaggccggtcttgatcccgaagtcggccgctgcgcagttgatcttcacttccttgtcgccgaacaggcggcccactacatagttgcccacgttgaggccggcgatttccatcaggccgcggctgattgcgccgtcgttgatgagcattttcaggtcaccgttggacgtgcccaacagcgccgccacggagttgccacgcccggcaatgtcggcatcgccattgagttcgccaaagctggttttcatcggttcaaaggtcgggaacagctgcttgagcttgaagttacgcgctgtcagtttggcgcggccttccatcggtgtggtgcggccattcaagcggatctgcgcatcaagcttgccgccggccacgccaaaacgcaggggctccaggctcagttcgccgtcgttaagcacgaggtgggtgtagaggtcggtgaacggcaactcggcgctgtgcacgatgcgtttgccggtgaactccacgtcagcatccatatcgcgccagcgctcggtgcggaactcttccaccggcagcaccttggtcgccggctgtttgctttcaccgccacgggctttttgcttggcgttggaatcggcgccgatcaagggcgcgaggtcggccatcagcaattggttggagaccagcgcgccggtgagcttgggccgtggctggctggcgacgtagcccaggttgccatggatatcgctgttgccgatcttgccgttgaagttctcgtaggtgaacgacgcgccgctggcctcatgcagcttggcaatcaagtggccgtcggtggaataagccggagagtccggcagagtaacgccggtcaacgggtagagattgcccaggctgctgccggaaagtttcaggcgcaggtccagggcgccgaggttcagcgggtcggtgagcgtgccagcgagggcgatgctggtgtcggcgatcttcacctgggcctgcaagggaaacggcttggccgcgtcctgcagcgccaacaggccgccgattttgccggtgccgtcgagcttctggccgtggtactggcccttgaccttgagagcgaacgcatagtcctggggcgccgagcctttttccagggccttcttggcgtccgcgtcaccgacgatctcatcgaagggaatcggtttgcccagtgggtcgatgatcacatcaagctgagttttgagggtttggtcgtcaagggtgacgtggcccttgtcgaagccgatggcgccaatgtccaccacccaactggagggctcggcgtcggggtctttggggtcgaatttgaaggtccagttggcgcggccatcggccaggcgctgcaagtcggcgctcggttcggtgaggtcgatacgcgggataaccacgcgctgtaccaacaacgccaggggcgaaatacgcagctcgactttcttgagcgtgaccatctgcggctgtttcgaccagtcggggttacccagggtcaggtcctcggcaatcacgtgaggccatggcacccaggcgcgccaaccgccttcatcgggctcacgcgcccacaccacggccaggttgccattgatggcaaagggccgatgcaattcttcagagactttggcattgagcggcggcttgatgcggttccagtcaaagaacacaagaaccagtaccaccacggcgattaacacaacgaagctggcgcagctccaggcgacgattttacgagtgcgcgtcattgcacaggactcctcaacacgactagctgaactacagctcataaggctacgactggcaaacggcgcgggggtttaacccgatgggtgaattagtcgcaaaaagccattttcctgatcgaacggacagatttgatcattcccggcgcaccaatgttacccacgttcgtgtcgaaaatacccagcacggtgcaaaaccgcgggcttgagaggcgcgatttagagccttcgaagggaacaatcaattctgttgattattaccattgtgtttatgaacttttatatcgacttatcaagagtagcattagccctgtacccactttatcgccctcccaaggagcaactctcatgaaacgccaagtactcgcagtcgccctgctgtccgtcctcgcttccagtgcctttgccctgccagctgccgaacaagcaaccccacagaacaaagctcaagccgttgaatccagccagaccctggcccgcagcggttcgcaagaagatgaaaaccgtgactacgccaaaggcgctgttgcagaaaatggttcggaacacgccaacaaacgcgcctacaccgaaggtgttgctgaaggtggccgtgatcgcctggaacagaaaggcctggtagaaggcggtgctgaacaagccaacaaacgcgcttacaccgatggcgttgccgaaggtggttcggaccgcctgcaagaactgcatcaagcacagagctaaccccgtggtggcccagaaaaaagcccgatctgccgatcgggcttttgctttttcatagatcgcgtcacgccttgcccctgccaagttcgacgccagcaaagctgttttgctagagtgcgtcgctgtactcgccgacaaagcccacccgccgatgctgccccgcgccgaacaaaagcaacagacccgcctcgccttgatggacgctgcccgccatctgatggagtgtggccgtgggttcggcagcctgagcctgcgcgaagtggccaagacggccggcatcgtgccaaccgggttttatcgccattttgatgacatggaccagttgggcctggtgttggtgagcgaagtcggccagaccttccgcgccacgattcgcctggtacgccacaacgaattcgtgatgggcggcatcatcgatgcgtccgtgcggatctttctggatgtggtgtcggccaaccgttcgcaattcctgttcctggcccgcgagcaatacggtggctgcctggccgtgcgccaggccatcggcgctttgcgcgaagacatcacccgcgacctcgcggccgacctgacctttatgcccaagctccagcacctggacgccgaaggtttgcatgtgatggccgacttgatcgtcaaaagtgtgttcgccaccctgcccgacatcatcgacccgcccgccgaagccctgcccgcccacctcacaccccaggccaaaatcacccagcaattgcgctttatctttatcggcctcaagcactggcaagggctgggcagcaccgagtaagccggtcaacctgcagtgtgaaagcgcttggcggtggtgtagttcttcttccagtaccgttggctcagcgagtcgatccgcacacgttttccggaactgggcgaatggatgaacttgtcctggccgatatacaggccgacgtggctgacccggccactcccgttccccgaaaagaacaccgcatcacccggcttgagcccatcgcgcttgatggttgccgcgttggagcggtgcatatcgctggtggtacggggcagctggatgttggcttcagtcttgaacaggtagaccagaaagctgctgcaatcgaagccgcgctccgtcgacgtgccgcccgccttataaggtgtgccgagcaactgatgggcgcggccgatcacattgtcgatagtggtcgggcggtgctggaggttggccgaggccaatggagtgccccctgccagagtgaagacaactgcacacaaaaatgacttgagcatgatggacgacgcagcgaattaaacacggcgcaaagcctaattaaaaagcgcgttttttttggaagtacgaatcctcgttctcagtaggaaacctcccaaaaacatctgacgagaaatagatgaaagaaatttcatgcagcctgcaacggatctcaacgcaaaacgcccacatccagtgctataaaccctgcaatgcaccaaattgaaacactcccggaacgggctgacgccctattcggaggcatggctgcgcctgcctacagggttttcctacttgcatgcctgattggcaagccccttgctctacctctcttatcgctcatagctggaagccttctgatgctggtgatccaccgccgaatcgccccccaaaccctctgggccgccgagttgctgctgaacttcgaagcacgcagcaaaagccgtctgcgctgtttcagtgctgacggtgaagacgtcggcctgtttctggagcgcggccagccgccgctgcacgatggcgaattcctgcaggctgaagacggacgcgtcgtacgcgtgtgtgcccgccctgaacagttgttgcacgtcacctgcagcaacgcgtttgaactgacccgcgccgcctatcacttgggcaaccgccatgtggccctgcaagtcggcgatggctggttgcgcctgctggatgactacgtactcaaggccatgctcgaacaactgggcgccagcacgcaaaccatcgaagcccccttccagccggaacacggcgcctatggcggtggccaccatcattcgcgccatggcgacgaagatttcaactacccgcccaagctgcaccagttcggcgtacgtctatgaacccagcctgggcgctgttgcgtctggccagtccgcaattgccgattggcggctacagctattcccagggcctggaaatggccgtggaaaacggccgcgtcaacgatgccgcaggcgcccggcgctggatcagtgaccagctgtcactcaacctcgcccgcttcgaggcaccgctgttgctcgcccactgccgtgccgcagccgatgaggattggccgcgtctggcgcagctgtgcgaggaacatcgcgccagccgcgagacccgcgagctgtaccaggaaagccggcaaatgggctattccctgcagcaactgctcaacggcttgcctgaactcgatgacgccgcgcgcagctttcttgaaagacgtaccgaaccccacctggccctcggctgggccctggctgcccgcgcctggaccatcagcccggatgacgccctcgccgcctggctgtggagctggctggaaaaccaattggccgtgctgatgaaaaccctgcccctgggccagcaagccgcacaacgcctgaccagtgaactgctgcccttgctgcaacacgcccagcaggacgcagcccgcattgaccccgaccatttgggcagcgccgctttcggcctgtccctggcgtgcatggcccacgagcgccagtacagccgcctgttccgttcctaggagacaacacagatgaacacacaacccctgcgcgtcggcatcggcggcccggtgggctccggcaaaacggccctgaccctggccctgtgcctggcgctgcgcgaccgctacaacctggcggtggtcaccaatgacatctatacccgcgaagatgccgatttcctggtgcgcaaccaggccctcgcaccggagcgcatcatcggcgtagagaccggtggttgcccgcacacggcgattcgcgaagatgcttcgatcaacctcgaggccgtggatcagctcaaccggcgcttccccggcctggacctgatcctggtggagtccggcggcgacaacctgtcggccaccttcagcccggagctgtcggacctgaccatctacgtgatcgatgtgtctgccggcgacaagctgccgcgcaaaggcgggcccgggatttgcaaatccgacctgctggtcatcaacaagatcgacctggcccccctggtcggcgcttcattggagttgatgaacagcgacaccacccgcatgcgcaacggcaaaccctttgtgttcagcaaccagaaaaccggcgtcggcctggaagaaatcgtcgcctttatcgaacgtcagggcttgctgactgcggcctgattcaaccccaataaggagcctgttcatgggtctcaacaaacttctcgcaaccgccgccctgctgctggcccccgccctcgccttcgctcaccccgggcatggcgataatgggctggtagccggtatcagccacccgctgggcggtatcgatcacttattggcgatggtagccgtcggcctgtgggcggcgcagcaaaaaggcaacgcgcgctgggcactgccgtgtgcgtttgtgggcaccatgttgatcggcggtttactcggctttgagggcctggaactgccggcgctggaaagcgggattgccgcgtcggtattggcgcttggcctggcggtagcattggcggtgcggccgccgctgtttgtggcggtgggtgcgacggcgttgttcgcgctgtttcatggggttgcccatggcctggagttaccggacatgtccagcccgtgggcgtatgcggcgggtttcgtcagcgcgacggctgcgctgcatgcggccggttatgcggtggtgcgtttcctgccggcggcagctgcgccgttggtgcgggtggccggggcggcttcggcggcgactggggtttggttgttggcaggctgatttgcagcgctgctgagggcctcatcgcaggcaagccagctcccacatttgtgggagctggcttgcctgcgatggcggtctcacagacaccacagaactcaagcctgctaccatgcgcgcctacacccctgccgtgacgacgccagccaatgcccagcgcttcccaaccttccttgaacaccgtgctcacccacttccacagcctcatcgtgccactctggcaaggccctggctggaatgccgagctggcgttgccctatgaagccctggacgccgatcaccagccgctgcccccgcagcgctaccgcgccatggcctgcgcccgacagctgtacctgtttgccagcctgatcggcgagcccggcgcggccttcgccgaagagcgtgcggccgcgctgttccgttccttgcaacggcacttccacgatgccgagcatggcggttggttctacagcatcgaccccgccggccagcccctggacaagcgcaaagacctctacacccacgccttcatcatttttgcctgtgcccattactgggccaaagtgcgtgagccgctggtggaatcggtacttaatgccgcgctggatgtggtcgccgaacgattcgccacaggcgacggcctgtacgaagcagtgctggagcgtaactggtcgtccctcggttccggaccgctgcaaaacccgttgatgcacctggccgaaggcttcctcgcgaccctggcagtacgtgaagacgccgtcacgcaagacgcgctgctggacttggccacggccatgcagaaacgctttatcgaccgccagaccggcgtgatgatggaaaaaccgctgggggctgtggataactggtttgaaccggggcatcagttcgagtggttctttttgctggaatcttcggaggtattgcgcggcaccccactgcatgcctcgctgacgcgagcgtttgcctacgccgagctcaagggtgtggataaatcgagtggtgcggtcagcggcatgctcgctctggacggcagtgtgcgcgacggcacgcaacggatctgggctcaggcggaatacctgcgggcgctgaccttgcggcctgccagtgaagcggtgctggaacgccagttgctggcgctgcagcagcactttttgcatgagaagggttggaatgaatgcctggatgccaaaggtgccgtgagccggcgggatatgccgtcgaccacgccgtatcacttggcgacgtgctatcagggcctgatccagcatctgggttgacctttggtgcctcatcgcaggcaagccagctcccacattcagatgtgtgaataccttcaaatgtgggagctggcttgcctgcgatagcggtctacctgagggtcaagcaacccacttgcgatccccggtaaagctgatcgtcaaccaacgcgccgcatccggcttacccagccctgtggatatctcctcacgcaacccgtcgagggtggcgacgttatccaccgggtaatccgccggcaacaccacatgaatctcgataaaccgcgcacgcccgtgcttttgcacgtaggacacgtaatcgtcgaaaccatgcctggcctttgccgcgtccatcacctcgcgcaccttgtcgtccaactggtccggggcaatccccaatacctcgcgcaacgccgggcgcagaatcttgaacgctggcgcgagcatgctcagggccagaaggatcaggatcagcgggtcgacatacaccgcccattcgccatagccctgggacttgagcaacaacgcggcgagaaaactgatcagcaaacccaccgacagcatcgcgtccaccagccagctgatgttgtcgaactggatcagcgaagatttcagcgtgcggttgcgataacgcacgtagaagaagtaggcgaattcaacaacggtgaacaccgccgcatagatgatcaccagccccaattcgatttcgcgcccgccattgatgatgccgaacacgccgttgaggaacgcgtagatcgcgatcaataacaggaagctgccttcgatcagcaacaccatgggttccaggtgccagtagccgaactggaagcgctcgttgcttttcttggcgatcagcttggccgtgatcagcatcaacaccttgatggcggtggcgatcagcgagaaaaagccgtcgaacagaatggactgggcgccagaaataacacccgtgacaatcccggcgatcgctaccgcgaacatcaggatggtcgattgtttgagcagtgcctgctcacctcggttactcacatttcctcccgtcaaaaccttaaatccgcacggtgcggaggggctttcagggggagagtgtaccttatggtctgttttacccgattgtggcgagggagcttgctcccgctgggctgcgcagcggccccaaaatcttagggccgcttcgcgccccagcgggagcaagctccctcgccacaaaagcaatcaggccttggcgccacgctcaatcgcaaacccagcccaggtctggctcaccggcatcagctccaaccggttgatattcacgtgcgccggggtgttcagcacccagaagatcgtgtcggcaatgtcctgcggctggatcggctcggcaccggcataggtcgcgtcataacgcgcctggtcacccccaaagcgcaccagcgagaactcgctctcacacaggcctggctcgatgttggtgacacgcacgcccgtaccctgcaggtcgcaacgcaggttcagcgagaactgcttcacgaaggccttggagccgccatacacatggctgcccgggtacggatagttaccggcgatggaacccaggttgatgatgccagcgccacggccatgggcgatcaagcgtggcaacaacaggctggtggtggttagcaggcctttgatgttggtgtcgaccatggtttcccaatcgtcgaggctgcacttgggcgcagggtcggtgcccacggccaggccggcgttgttgatcagcccgcgcagcttggcgaacgagggtggcaggttggcgatggcgtcttccatgcccttgcggtcacgcacgtccacgaccaggccgtgtacttcggtttgcctggaaagctcttcgaccagcgcattcaggcggtcggcacgacggccagtgagcaccagtttccagccagcgtcggcaaatcgacgggcgcaggcttcgccaaagcctgaggttgcgccagtaataaacagcgtgtcggacatggtgttctccttgcgggcatcggggaaaaaatcagccagcagaatgcccgtacaccgccgttgcggcaacccatatgcacccaccttcatctacaactgatcattttttgatcatgccgagcaaagccacgcaaaccgtggcttgcagccatatgcgcgcagcttatccacagctgggcccacagtctctgggggcaagtacaaaacgcctaaagccgctgtgtgcggggcttgcaggcggttttagaaagttttttgcttgaccttggccgggccgtatgtagacccatcgacaggaggaaaatcaggacgatggctccaggccagtcattccggcctctgcggcactctttccagagtttaatcacagacttatccacaggccccaaggacatatttcggtcatatacctgtgtctttaaacaggttgacaaacccctcggcaggccaccaaaaaaccgctgatcaaaaaacaaccgccacgctacaggccgcgtggttattggctttcaggcaggtactcccacgttacccacagccggttccacagcggatggggacaagtcaaaactgtgacaaaacagggatttgcggcggctatatgtcgcgctttgggaggaggctggatttgttttccacaatttggcgcagcgtctgtggacaccccaaaaacaaatgtgggaaccgcactttatgtgggagctggcttgcctgcgatggcatctcctcggtctacctgaaagaccgaggtgcttgcatcgcaggcaagccagctcccacagagagccggttcccacaggggttttgcgtcaagctttagatcagtgcccgcccaggtaggcgttgcgcacttcttcattcaccagcaattccttgccggtacctgtcaggcggatctcgccgttgaccatcacatacgcccggtccgacaaacgcagtgcgtggttggcgttctgctccaccagaaagatggtcatcccggtggccgccagctcgcgcagggtggcgaaaatctgcttcaccacaatcggcgccaggcccaggctcggttcgtccagcagcaacagcttgggccggctcatcagcgcgcgggcgatggcgagcatttgctgctcgccacccgacatggtcatcgcccgctgggtacgccgctccttgagccgcgggaacagctcgaacatgcgctgcatgtcatcaaaggcgaacttatccccaatcgggatggtacccatcagcaggttctcctcgacggtcatgtcggggaacacccgccgcccttccggcgactgcgcaatgccattggacgcgatgtagtgggacgacttgtgggtaatgtccacgccgttgtacagaatctgccccgactcggcgcgcggctgcccgaaaatcgacatcagcagcgtggatttgcccgcgccgttggagccgatcaggctgaccgtttcgccttcgttgatgtgtagcgagacttttttgagggcctggatcgggccgtaaaacacgtccaggtccttcatttcgaggataggtgcactcataccagctcctcttcgtctgcgcccaggtaggcggcaatcactttcgggtcgttgcggatcgcgtccggcccgccttcggcgatcacgttgccgtggtcgagcaccacgatgtggtcggaaatactcatcaccatgcccatgtcgtgttcgatcagcaccaccgtgaggtcgtgttcgtcgcgcaacaggcgaatcatcgcgctgagggcttcggtttcctgcgggttgagccccgcagccggttcgtccaggcagatgatctgcggccgggtgcacatggcgcgggcgatttccaggcggcgctgctggccgtaggaaagctcaccggccaggcggttggcgcagtccaccaggtccaccacttccagccagtagaaggcatggtcgagggcgtcgctctcggccttgcggtagcccttggtgttgaggatgcccgcgagcatgttgcggttgacccacatgtgctgggccaccagcaggttttccagcaccgacatttccttgaacaggcgaatgttctggaaggtccgcgccaaaccggcacggttcaccaagtgagtgccgccgaacatcttgtagtacacgcggctgaggaagctttttggcgacacgaagtcgacagctttgaagcgctcgccgagcaactggatcacattggtctgcttgccgcgaatattcagttcgatcttgccgccgctggctttatagaaaccagtgaggcagttgaacaccgtcgttttaccggcaccgttggggccgatcagggcgaagatcgagttgcgttcgaccttgaggctcacatcgctcaaggccttgatgccaccgaagtgcatcatcaggtgttccacggacagcacgacttccttgctcatggcgctacccccttgcgtggtgtcacaccggtacggctgatccggatcaggccccgtgggcgccagatcatcatcaccaccatcaacacgccgaacagcaacacgcggtattcggagaagctgcgcagcagttccggcgcgacggtcaatacgaacgccgcgatcaccacgccgaccgtcgaccccatgccgcccaataccacgatggccaggatcagcgccgactcgaagaaggtaaacgacgacgggttgacgaagccctgatagctggcaaagaacacccccgccaaaccggcggtagaagcgccgatggtgaacgccgagagtttgaccaaaacatggttcaggcccatggaacggcaggcaatttcatcttcgcgcaaggcttcccacgcgcggccgaccggcatgcgcgtcaggcgatgcttgatgtacagcacggccagcaccaccagaaacagcacgatgtagatgaacatgaacttgatgttggggttgtaatcgatgccgaaaaactcgtggaacggaatcccgccgtccttcgccttgcgcccgaattccaggccgaggaaggtcggcgaaggcaccggcatgccgttcgggccgccggtgaacgacagccagttgttcagcaccaagcggatgatttcaccaaagcccagggtcacgatggccaggtagtcaccgtgcattcgcagcaccgggaaaccgagtatgcagcctgccaatgcggcagcgatggccgccaatggcagcacactccagaaacccaggcccaggtattgataacccaaggccaggccataggcgccgatggcgtagaacgccacgtaacccaggtcgagcaagccggccaggccaaccacgatgttcaggccaagcccgagcagcacgtagatcagcccgagaatcaccacggtcagcaggtacttgttggcgaagatcgggaacacgatggcaatcacgatcagtgccgggatgatccagcgcaggcgggatttgtagtcgggcggcaacacatgcacgccggagccactgctctcgaagccctgcagaatcttcaggcccttgggggtttgcaggaacaggctcagggcgaagcggccggccattacgatggcgaccagcgtggccacacgggccggttccaggttgaagctgtagccgtcgaggaccacgccgacgatcggaccgaacacgatcagggaaatcagcccggcgaggaccgtatcgaccacacttttcttgatatcgatgggtttggcagcagacatgtttacaccttagccacgagtgggcgacccagcaggccctggggacggaagatcagaatcaccaccagcagggagaaactgaacacgtctttgtagtccgagttgatcaaccccgagaacagcgactcggagatacccaggatgatcccgccgagcatggccccaggcagggaaccgatgccgccgagtaccgctgcggtaaatgccttgatgccgatgatgaagccggcatagaagtcgaaggtgccgtagttgagcgtaatcaacacgccagccagggcggccatggcggcaccgatgacaaatacgtaggagatcacgcggtcggtgttgatgccgaggatggaggccatcttgcggtcttgctgcgtagcccggcacatacggcccagcttggtgtatttgatgatgtaggtcagcaaggccatgcccgcgaaggcggcgaccagaatgaagaccttggtgtacgtcaactgaacgaaaccggtgccgaagtcgacacgccaggccccggccagcagggtgggaataccttgttgcttggcgccctgtgcgatctgggcgtagttctgcaggatcagggagatcccgatggcgctgatcagcggtgccagtcgggtggagttgcgcagtggtttgtaggcgacacgctcaatgacccaaccgtaaacgccggtgacgaccacggtgaagatcagggtgccgagaatgagcagcgggaaggattcgatgccgaagtaagccagcagtgccagactgatcgccgcgaggtaagcggaaatcatataaacctcgccatgggcgaagttgatcatgccaatgatgccatagaccattgtgtagccgatggcgatcaggccatagaccgacccgagggtcaggccgttgaccagttgctgcaggaaaataccatccataacgcaatctcacgcggtgagcacctgcacaccggagggtgtgcggcgcttctggaggaaaagacagatttgttgcctggcggcaaggctcgaacaaccacaacccatgtgggagctggcttgcctgcgatgcagacaccgcggtgcttcaggtgtactgcggtgatgcaatcgcaggcaagccagctcccacagggatggagggtgttcaagccattgcgttaattacttctgtttttccagctggtggtatttgccactggcatcccactggtaaaccacgtagtcggagattttcaggtcacccttgccgtcccactctttcttacccatgacggtctggaccgggtgggatttgagccacttggccgcgtcttcgcccttgttggacttggaaccgttgaaaccggccgccagggcctggatcgaggcgtaggcgtacagggtgtagccttcaggttctacgccggctttgcggaattgctccacaacggccttgctgtctggcagtagacgcgggtcggcgccgaaggtcatgtacacgccgtctacgtattgggcgccgccagcggtggccaccagttcgtcagtcacaacaccgtcatcggacatgaacttgacgtctttgaggccagcttcacgaatctggcgaaccagagggccggcttccgggtgcaggccgccgaagtacacgacgtcagccccggtggaacggattttggtgaccagggcgctgaagtctttctcgccacgggtcaggccttcttccagcactggcttgacgccacgtttggtcaactgggcagcggtggcatcggccaggcctttgccgtaggtgtctttgtcgttgatgacggcgacttttttgcctttgagcacgtcgacgatgtagtcaccggccacaataccttgctggtcgtcacgcccgcacatacggaacacggcgcccaggccacgctcggtgacctgtgggttggtggaacccggggtgatcatgatgatgcccgcttcgtcatacacctcggacgccgggatggtgttcgacgagcagaagtgcccgaccacgccgatcactttgtcctggtcggccaggcggttggccacggctacagcctgcttgggttcgcaggcgtcatcgccggcgaccagtttaatctgctcaccgttgatgccgccggccttgttgatcacatcggctgccgcttgggcacccttcatgtactgctcaccgaaagcggcgttggcgcccgtcatcgggccggccacgccaattttcacatcagcttgaacaaacgcagaaacacccagcgccgctgcaacggcgagggccagaaaacctttcttgtaaaacgtctgggacatgagtggtgctccgaggtttttgtttattggcactacgaaatcactgcgaacttccgattgaaactttcacggaaagcccagagcaaggcgcgtgccattacgtttttattaacaaaaaagacacggtgtcattgttattacaggcgtttcggctcatcgcgccagtacgtgcaaccctctagcatcgagaggtgcaaccaatggatccaaaaagtacaacccgggccggtcgcacctgcaaccgggcgaataaacgacagttcctgcacctgtaacaatgtgcgtaacggaactgcacatttacagtgcgtgattgctacgacttgcaccaatacagattagtagcctgctaagaaaatgcaggcttttgaggggtacttcgctgatcagatcacgatcctcaggcattgcccggcgtgatacagcgagaatcctgcttcatacagacaactgcgcaggcccaccccggccaatggttgcatcggcgcaaacggaatcggcagcgcctggggattctggtgacacaaatagtcggcaaacgccttgccgaccacactgccggtggtcacgccgcgcccgttatagcccgtaactgccacaagaccgggcgccggctcgaacaggcgcatgaggtggtccggggtgaaagcgatgcagcccgtccaggtgcactcccactgcaccgatttcaggtacgggaaataatgctgttgcacccgatcggcccacgccttgagaaaccacgccggtttctgattgccattgcccaggctgccgagcaacagacggccatccgcgtcacgacggatgctgctcagcacctggcgcgtatcccaggagccctgcccgcctggcaggatttgtttggcggcgtcgtccgtcagcggcgacgaggcgacctggtagtagtagcccgggaagaagttgcgccgcagctctgtccattcgccttcggtgtaggcgttggaggcgatcaccacctgtgccgcctgcacggagccttgggcggtttgcaccgaccagttggcgccctggcgctcaagttgagtcaccggggaatggtcaaacaactgcccgcccagcccaaccgccgcattggccaaaccactggtgtaggccatcgggttcagggtgccggcgcgccggtcgagcaaggcggcggcgatctttcgggtgcccgtggcttgctcgcaggcttgcccggtgagcaattcgaccggcgcaccacggcgcttccattgttcttctcggctgcgcaaatccgcctcgccacgggcgttatgcgccatatgcagggtgccttcgcggcgcaattggcaatcgatgttgtatttgtcgatcaggctgaacaccagtgacggcgccgcgccgagcatgcggttgagctggctgcccaccgcttcgccgaaacccgcttcgatctcgtccggcgggatccacatgccggcgttcaccaacccgacgttacgccccgagccgccatggcccgtgcggtgagcttccagcacggcgacgcttttgccctgctcgagcaaatggatggcggccgacaaaccggtgatgccggcgccgatcacgcacacatccaccttcacctcgcccttgagcgcggcccgatccggccggccaggggtgagttgttcccacaaacatgcttcgcgtaatgccattgccagactccgaatgaaacctaacaaaccactattatttttctttgcgaacccaatcaactgtgggagctggcttgcctgcgatgcaggcacctcggtgcatcagatacaccgcggtgatgctatcgcaggcaagccagctcccacattgaccgtgctccgaccgaaggggtcagtcgaaggtaatgccttgggccagcggcaactccagcgagtagttcacggtattggtctggcgacgcatgtacccgcgccacgcatccgaacccgactcacgcccgccgccggtttctttctcaccgccaaacgcgccgccgatttccgcgccgctcgggccgatgttgacgttggcgatgccgcagtcactgcccacggccgacatgaactgctcggcctcgcgcacatcggtggtgaagatgcacgacgataaaccttgaggcacggcgttgttcaggcgcagggcttcggcgaagtcggtgtagccgatcacgtaaaggatcggggcgaaggtctcggtgcacaccacatcgctttgctctggcatttccacgatcgcgggcgccacgtagtaggcattcgggaatttgtcttccaactggcgcttgccgccgaacaccttgccgccttcgctcagggcttgctccagcgcatcctgcatgttgtcgaagccgtgcttgtcgatcagcgggccgatcaggttgccttccagcgggtggccgatgcgcactttggaataggcggccttgaggcgggtgacgatttcttctttcaccgactcatgggcgatcaggcgacgcaggctggtgcaacgctggccagcggtgccgacggcgctgaacagaatggcgcgcacggccatgtccaggtcggcgcttgggccgagaatcatcgcgttgttgccacccagctcaaggatgctgcgggcgaaacgcgcggcgactttaggcgccacttcgcggcccatgcgggtgctgccggtggcgctgatcagggccacacgcgggtcatccaccagcgcggcgccagcgtcgcggccaccgatgaccacttggctgaggtactcgggggcgtcgctgaattttttcagcacgcgctcgaacaatgcctggcaggccaaggccgtcagcggggtcttttccgacggtttccagatcacggcgttgccgcacaccagcgccagcgtggtgttccacgcccacaccgcgaccggaaagttgaaggcgctgattacgccgaccacgcccagcgggtgccaggtttcacgcatatggtggcccgggcgttcggaggcgatggtcaagccgtagagctgacgggacaggccgacggcgaagtcgcagatgtcgatcatttcctgcacttcacccaagccttcctgggtgatcttgccggcttcccacgacaccaactcgccgaggtcggccttgtattcgcgcagcacgtcgccgaactggcgcaccagctcgccacggcgcggtgccggcactttgcgccaggcctcgaatgcatgctcggcgcgactgacctgttgctccacctcggcggcaccttcccaatgcacgctgccgatacggctgccatcgatcggcgaatgcacgggctgtttacccgactggtacagcgccgggtttaccccgagacggtcaagcaatgcggcaaccatgggtcactccttcaatctcaaacagaaaattcgcgccgccacacgcacggcgatccaagccttatttgtagctggcccaagacttgccaacaaacgacgattaggcgagatatcattccgtttattcatgcaaagcataaaaagaggcacaccgtgctgaataaaagacatttgccctcgatcaccgccctgcagtgtttcgaggccgccacgcgccacctgagcttcacccgcgccgccgaggagctgaacctcacccaaagcgccgtcagcaagcaagtggcgcagttggaagaattgctgcaacacctgttgtttcgccgggtgcgtcgccgcttgcagatgaccccggcgggggatttgtacctggtggaagtgcgaaaaatcctcacgcaggtggagatgtccacccattacctacgctcctacggcggcgagaccgaagtattgcgcgtgtccacgccctacaccttcggtgcgcgctggctggtgccgcgcctcaagggctggcggctgcgtcacccgcaaatccatctggacctgtgcaacgagcaggagccggacgaactgctgcaaggcaaggccgacatggccttctacttcggccagggctcacggcccggcaccgaaagccttaagttgttcagcgaagagctggtgccggtgtgcgcgccagaaagcctgcctgcgcagccgttcaccgaccccacccagctgagcaacctggtgctgctgcaaaacgcctcgcggccgcagggctggcatgactggttcgccagccagggttatcagaccgagcacagctaccacgggccgcgtttcgataccttttatatgtgtatccgcgcggcgcaggtgggctgtggtgtggcgttgctgccacgttttctggtggaagaggaactggcggacggcaagttggtgatcccttggcagcacgcgatgccgagccaggatgcgtattacctggcctaccccgagcattcggcggaggtgcccaaggtgcgcgaatttgtgaagtggatgatggagcaagttatctagcgcctggaataccgctatcgcaggcaagccagctcccacatttggaacgcctttcaagtgtgggagctggcttgcctgcgatggggccggtgaccgcactgaaaaaatcactggcaaaccacccctcgcctatgcgccactagcgccattccttaattgtgcgtaaaggccggcgcccatcgccgacccgtctggagattcccgttatgagcgagagtgtgtttgccgatcgcatcgtgcagaacttgctcgacaccgacttctacaagctgaccatgatgcaggcggtgctgcacaactacccgaacgtggaagttgaatgggagtttcgttgccgtaacagtgaagatttgcgcccctacctggcggagatccgctaccagatcgagcgcctcgcggaactgagcctgagccccgaccagttaggtttccttgagcgcatcagcttcatgaagccggattttttgcgcttcctcgggctgttccgcttcaacctgcgttatgtgcaaaccggcatcgaaaacggcgagctgttcatccgcctgcgcgggccatggctgcatgtgatcctgtttgaagtgccaatgctggccatcgtcagcgaagtgcgtaaccgctaccgctaccagaccgtgatcctcgaacaggcccgcgagcagctctatcgcaagttcgactggttgacggccaatgccagcgtcgaagaattatccgagctgcaagtcgctgacttcggcacgcgccggcgcttctcgtaccgcgtgcaggaagaagtggtcagcgtactcaagcacgacttccccgggcgtttcgtcggcaccagcaacgtgcacctggcccgcgaattcggcatgaagccgctcggcaccatggcccacgaatggatcatggcccaccaacagctcggcccgcgcctgatcgacagccagatcgccgccctcgattgctgggtccgcgaataccgtggcctgctcggcatcgccctgaccgattgcatcaccaccgacgcgttcctcggcgacttcgacttgtacttcgccaagctgttcgacggcctgcgccacgactccggtgacccggtgcagtgggccgagaaagccatcgcccactaccacaagctcggtatcgaaccgatgagcaagaccctggtgttctccgacagcctgtcgttgcccaaggcgctggagatattccgcgcgctgcgtggtcgcattaatgtgagcttcggcatcggcaccaacctgacctgtgacattccaggtgttgagccgatgagcatcgtgcttaaaatgaccgcctgcaatggccagcccgtcgcgaagatttccgatgaagcgggcaagacccactgcaccgatccgaattttgtcgcctatttgcgtcacgttttcaaagtacctgccctatccagcaaggagtgaatcatgcaagccgtacagcgtgagattgcgcagcagctcaaggtccaggcgccgttcaatgaccaggccgcccttgaagcagaagttgcccgccgcgtggcgtttatccaggattgcctgcgcaattccgggctcaaggcactggtgctgggcatcagcggcggtgtcgactcactgaccgcaggcctgctggcccagcgcgcgatgaaagaactgcgcgaaagcagcggtgacgaggcttaccgttttatcgcggtgcgcctgccctacgaaacccagttcgacgaaatcgatgccaccgcctcggtggatttcatcgaaccggacgaacgccacaccgtgaacatcggcccggcggtcaaagccctggccaatgaagtcgccgcgtttgaaggcaaggcggcggtgtcccgcgatttcgtgctgggcaacaccaaggcgcgcatgcgcatggtggcgcagtacaccatcgccggcgcggccggtggcttggtgatcggtactgaccatgcggcggaagcggtgatgggctttttcaccaagttcggtgatggcgcgtgtgaccttgcgccgttgagcgggctggtgaaaaaccaggtgcgtgcgattgcccggcattttggtgcaccggaatcgctggtggagaaagtgccgacggccgaccttgaagacttgtcgccgggcaagccggacgaagcgtcacacggcgtgacctacgccgagatcgacgccttcctgcatggccagccggtgcgcgaggaagccttcaagatcatctgcgacacctaccgcaagaccgagcacaagcgggtgatgccgttcgcgccgtgaggtgagccagacaggtttgccgtgattggcagaccgctttcgcaggcaagccagctcccacacttgaccgggttccagcctgagaatgcggtcgaatgtgggagctggcttgcctgcgatgaacgatgacacagtacttctgaccctccacaaaaaagcgccccgcaaggcgctttttttgcagctggaaccctgttacttcagggtcacagtgcctttcatcatcgagatgtggcccgggaacgagcagaagaacgcgtaatccgtcccggccgccagcttcgacacatcgaaggtcaccgaatctttctcgccggcaccaatgattttggtgtgggcaatgatgcgcgtgtcgccgtctttcaggtagttcttgtcgataccggcagccatgccgtcgctggcgatgcctggcatgtcagcggcggagctcagcacccagttatggcccatcacgtttttcggcaagctgccggagtgggtcaattctacggtgaaagttttgcagcttttgtcgatttcgacggccttggtgttgaaggacatctggtcggtggagtcgacagtgaccttgcactctgcggcaagcaactggccgcttgccagagtcagcagggaaacagcaacgagtttggcaaacatgtgaatctccatggcagggttttaaaagcgcggattgcgacaagggtgccgcaatcagacagaaattcttatgatctgagtcaacagattgtatacaactttaggctatcggcgtgatcaacacaatctaccagccaaagcggcggtgcccgcctatgatcggcccatcaaccaccggagcttgcgccatgcacctcaaccaactgttcaacggcctgttggccgcgtacgcctgcggtaagtgaaggccaagcgcggtgctaagctgctaccatagcgacccaaggcagccgcgcgccgccaccctcaccttcgaccctagaggatcgcccatggccaaacctaattactccttcgccaaacgtcagagagacttggccaaggagcagaagaaagaggaaaaactgcaacgcaagaaagccgctgcagatgaagaggccaatgggctgaacgccgataccgatgctgaagagacgaacgacgagaccgaaacaccaaaagatcctgctgaatagccgatcgctgatgtgggagcggggcttgcccgcgatgcaggcggctcggtgtattagccaaatcgagtagcggccatcgcaggcaagccagctcccacacaagccagcccgcaaacctctactctagcggcatcaccgtcacccgcacttccgggtcatggctccctccccccagaatcaccccgcgcaacggcgacacatccgagaaatcccggccccaggccagggtgatgtgctccagtgccggctgcacgttgttcgtcggatcgaaatccacccagcctgataccgggcaatacaccgagacccacgcatgcgacgcatcggcgccgatcagccgtggctggccgggcggtggctgagtcagcaggtagccgctgatgtagcgcgccgccaggccacgcgaacgcaggcaggcgagcatcaggtgggcaaagtcctggcacacgccgcgccggcgctccagcacttccaccagcggcgtggcgacctgggtggcttcggcatcaaaggtgaattcgctgaagattttctccatcaaggcctgtacgccaagcagcaagggctcgccgggaggaaagcagctctcggaaaactcgacgaaggtgttcttcaggtgcacgtagggcgattcgaagcgatagcggcaagcctccagcctttcaggcgatagcgcctggctggtgtagctcaggctcgcgccggtctggtcccagggcggtgactggtgaaaatccggcacaggccgcgccagtacctccacggtcaagccggcattcaccagcaactcatcatgggggcgctcgaacgccagccgggtgatcgggttgccaaacacgtccagctcatcgcgacgcgaggtcggctcggggctgatatccagttgctgcgaactgcagcgctgccaggcgcaaggccgtggccacaaatgcgccaactgctgggcgagggacaccgggctgtcgtagtggtaatgggtatcgtggaaaatctgatagcgcgcactcatcacaccgacaccgtttgctggctgacatcatccacatgggcaaagtggcgcaacgcgaggcgatccgacacttgcccactctcatcggcgaccgcttgcagcaggtcggccaggccatccagcgcggcacgcacgctggactcaccaaacaacgggttctccaggcaacccaggtcgaaacgcgagaggcgttccaccaagggtgccaggccggtttcccggggcacgccaaagtcatcattgagacggcgcaaggtgcggctgaccagcttcaactggaacaacaccgcatgggggttctgctcatccagcaacaacaggtcgagcaccgggatcaactgcggtaccgccaggtagcgcgagcgataggtgatgctgctgttgcccagctccagcaaccactcaagcccggcctgatcaaacaccgctacgccacgcaggaacgccgccaaactactgctgagaaattgcaggcgctcgatgcgccggcccatcatcaagaagcgccagccttcgtcgcgggtcatgtcgtccaatgcaaacccggacagcgccgcgagcgacatcaccaaacggttgaggaaatccaacagttcgccgaagtctggtgtttcgctttccagctccagggcttcgcgttgcagctcgaccaaggcctgccagttttcccgggataacttgccgcgcacctgggacgccgcccactgcaagcgctgcaggttggcccgcaggctcgacggccagtcgtcaccgagcaaggcggcgagcaggcgctcgggcaattcgccctcctccggcagcaggcgaaggttctcgcccaattcgaccgccgcctgcaacgccagtggatcatcgccgtccacatagcgcgccagcacaatgcgcagccagcgcgcgctgtcatcgcaacgctcgcaatagcggccgaaccagaacaggttttccaccacgcgcgacggcagatacgggtcgcggcgcaccaagtcatgggcaccgatcgcacgctgggcgcgccaatgttcaccgccgattgcacgctcgccgagcacccaagtgtccttgctcgcgccgccacgttgcatcgacaccacttcggcatcggcttcggcggcgactcgagtcaggccgccaggcaacacgcgataaccctcatcgctggccacggcgtacacgcgcatgccgatggcgcggtgctgcaggtggtcgtccacggtgtgccacaccggcgcctgagacagctgcgccaactcttgggcgacataagcgtaaggtcgcgcgcgcatgcgttcggccagggcctgacgttgctcgtcattcaaatcgcggccgaacaccggactgaaactttgcgacgggaatgccggcttgatcagcagctccggcaatttctccagcgcttcggccagtaccggcgcttcaccgcaccaccaagtggcgatggacggcaggatcagtgcttcgccaaacaggaactcgttgatcttcggtagaaagccgagcaagcccggggattccagcacgccgctgcccagcgcattggccaccagcacattcccttggcgcaccgcgtcgagcaggccgggcacgccgagggcggagtcggtgcgcagttccagggggtcgcagaagtcgtcgtccaggcgacgcatgatcgcgttcacccggcgcaggccgctgagggttttcaggaacacggtgctgtcgcgcacggtgaggtcgccgccttccaccagcgggtagccgagctggcgcgcgaggtagaggtgttcaaaatagctttcgttgaagcgccccggcgtgagcaacacgatcagcggcggctggtcatcaccgggcgcctggcgggccagggtttcctgcagggtgcgaaagaaaccggtgaggtgctgcacctgcaggtcccggtaaagatccgggaacgcacgggacacgatggtgcggttttccaacgcataacccgcgcccgatggcgcttgggtccggtcggcagtgacccaccagcggccatccggggtgcgcgccaggtccacggcgtacaggtgcagaaaggcaccgtcgggcggctggatgccctggcacggccacaggaaattgttatgcccgaacaccagctctgccggcagcagcccctccttgatcagccgctgcgggccatacaagtcagccagcacggcattgagcagacgtgcgcgctgggcaataccggccgacaggtgctgccactcatcggcggccagcacgtggggtagtaaatccagttcccaggggcgggcggcgcccttggggtcggcgtagacgttgtaggtcacgccgttttcctgaatctgccgggtcagcaatgcctggcgctgggccagttgcgtcggtgtgctgcgctgcaggtgatcaagcaagcgctgccaatgggcacgtaccgcgccactgtcatccagcagttcgtgataagtgcccgcggtcagcgggtaacggtcgagcaagtcggacatggaacgctcggcaggggcaagggggctcagattaacctaacaaacactgcaaatcccttgtgggagccggcttttggggcgagggagcttgctcccgctggagtgcgaagcgctcccaagctctttggggccgctacgcagcccagcgggagcaagctccctcgccacaaaggccagctcccacctctggattgcgttcattccttatttttggggaaacgccgtagatccaaagtcattggcagctcatcgttaatcaccaaaggaggcacgggaagcttgccagggctatgccccaaccggaaaaaccgcgccatgcgccggctctccgcttcattggcattcaccggcaagctgtcgtaattgcgcccgcccgggtgggccacatgatactggcaaccgcccagcgagcgctgcatccatgtatccagcaaatcgaacaccagcggcgcgtgcaccgggatggtcggttgcaggcagttggccggttgccaggcgcgataccgcacgccggcaacgaactcgccgacgcgcccggtggcttgcaacggcaccgggatgccattgcaggtcagcagatagcgctgcggcgccagcccgctcaacttgacctgcaagcgctcaagcgacgaatccacgtaacgtaccgtgccgccgacagcgccctcttcacccagtacgtgccagggctccagggcctggcgcagttccagttcgataccgctgacggcgtagtcgccgaccttgggaaaacgaaactccaggtgcgcggcaaaccactcagcgcgcagcgggtagcctgcggcgttcaattcgacgatcacgtcggcaaagtcctgctcgatgaaatgcggcagcaggaaacggtcgtgcagctcggtgccccagcgcgccagcttcgtcggcgcgtagggctcccgccagaaacgcgcgaccaacgcgcgcaacagcaattgctgggtcaggctcatgcgcgcatggggcggcatttcaaacgcgcgcagttccagcaggcccaggcggccggtggcgccgtcaggtgagtagagtttgtcgatgcagaattcggcgcgatgggtgttgccggtcacgtcgatcagcaggttgcgcagcaggcggtcgaccaaccacggcgggcagtcttcgcccggttcaggcatttgtgcgaacgctatttccagctcgtacaacgcatcgttgcgcgcttcgtccacgcgcggagcctgagacgtcgggccgataaacaggccggaaaacagatacgacaaggacggatggttatgccagtagctgatcaggctgcgcagtagatcgggccggcgcaggaagggtgagtccttgggtgtcgcgccgcccagcacgaagtggttaccgccgccggtgccggtgtggcgcccgtcgatcatgaatttctcggtggtgaggcgggtttgccgcgcttcttcgtagaggaattcggtgcgttccaccagctcgtcccaggtggcggacggctgcacattgacctcgatcacacccgggtcgggtgtgacacggaagttgctcaggcgcgtatcagccggtggctcataaccttccagcagcaccgggcaatgcagctcttcggcggtggcttcgatggcggccaccagctccaggtaatcctcgacgcgttccagtggcggcatgaacaggtacagccgcccttcccgcgcttcggcacacaaggccgtgcgcgtcagccagtcggcggactggtccaccgtgggcacacgctcatcacttggcgcagcgtcggcgtggctgtgcaattgagccgtcgtcggcaagtcaggttgatcctgattggggtcgaccgggtgcacgaatggatactccgccgccgttacccacggctgcgaggccagcggcaggcgatagcccagcggcgagtcaccgggcaccaggcggcagtggttatcgcgcaggtaccaacgcccgctctgccaacggtcattggcggcggtgcgcgccagcggcagcacttggccgatgactttatccaggccctggctgaatactttacgcagacgctcgcgctccaggtcgtcgctcaggcgcgggtccttcgcggtgacgttttgcggcagcgcgccttcgcgccacaagtagtaaaaattgtcttcgaaggccgggaacacaaaacgcgccggcaacttcaggcgttcggcaacactggcgaggaaacgcccggccatcacgccgtcggcaccgtaatcctcttgctcatcggcgatcagcgcactgttgtgccagatcggcacgccgtcgcggcgccagtagcagttgagcgaccagcgcggcagttgctcgcccgggtaccacttgccctggccaaaatgcaccagccctttgggggcgtaatgcgtgcgcatgcgctggaacagctcggcggacaggcgacgcttgtccggccccagtgcggcagtgttccattcggcgccatcggggtcatcgatggagacgaaggtcggctcgccgcccatggtcaagcgcacatcagccttgagcaggtcgccgtcgatctgccggcccagggcctggatcgccagccattgttcttcggtgtagggcttggtgacacggggcgcttcccaaatacgctccactgacatttcgtgggtaaattcgcactcgcacggttccaccaagccactgatcggcgcggcagaagaaggatcaggactacaggccaatgggatatggccttcaccggcgaacagcccggaagtcgcgtccaacccaatccagccagcgcccggcaaatacacttcgcaccaggcgtgcaggtcggtgaagtccacttcagtgccggacgggccatcgagggctttgacgtcggcggtcagctggatcaggtagccggacacaaaccgcgccgccaagccaaggttgcgcagcagttgcaccagcaaccacgccgaatcccgacaagagccggaggcattttccagggtgaactccggggtttgtacaccgggctccatgcggatcaggtaaccgatatcggcggcgaggcgctggttgaggcccaccagaaaatccaccgcaggcaatggcgtgcggtcgatgccggccaggtaagcggcaaacttcggcgtcagcggcagggtttccaggtaaggcgccagctcacgctgctcatcggcggcgtagttgaaggggattttttcggcgtagggctcaaggaaaaagtcgaacgggttgaacaccgccatctcggcgaccaagtccacttcgatgcgcagctcgtcagtcttttccggaaacaccaggcgcgccaggtaattgccttgggggtcctgctgccaattaatgaagtgctgctcgggcagcactttgagtgcgtaagacagaatccgcgtgcggctatgggcggccgggcgcaaacgcacaatctgtgggccgagttcgacagcgcggtcatagcggtaatgcgtaacgtggtgcaacgcgacatgaatcgacacggcggcctcctgcgagccagggcatggaaacaaagcgcgcaagacttatgccagagcggccgtcattgcgctttatcgagggacccggtgcagtacagcaccaaaacggcgccaacgcgggggccgtggtgcgaggcttgcacatatttgtggcggatgtgtgagaggcgggtggtgaatctacccaatcaacggggtttcgcggtgtctcgcaggtgacgcacctcaagcagcttctggcgcatttcgcggtgacgtttgctgttaagcagtaacagccccagcagcggcagcaacacgctcaagccatacaacaggaaatgcggccggtacgcgacagtcggcaataccgccagaatgcacagccccaacagggctgccagcggccaaacccattgcgggcgcccccgcgcgatcatgaaattgcagtgcaccacgacccaggccagcgcaaggccgcccaagaaggaatacttggcgttgtccgccagtggaaggtccggaaaataactgtcgaaaatcagcggaacagccagcaccagcgtaaacacagcggcaaagatcgcgcccatgaatacaggaaaatactgcgagagaaagctgcgaatacccggcatttcattcatcactcgatctcctcatacaggcctacggcaagggtgcgcacattccctgaaaccgcactgccggttaaaccgattgcagcgccgagcgcatccttgatctgcgtcaccgtcgcgtgcttgacctgggccggcgtgaaacgcttggtcgcctcgcctgacagctgtttcaacttgagcatttttgaggtcatacgcgggtctttgatactgagcaattccttggtcagcttggcgcgctcctgacggttcaaacccttgaggacctcccgcacgcttttgccggtggcggcttggttcatgcgaaccagtttcagcgtggtcaacgacgacgcgcccacgccgatcagcgaagcggcatccagcgcaatcatcgtgtactgataccactgggcgctgtcgagttcgtcatttttggcggggttgctgatttcattgaccgtgcgataaccactggcgacgcactgcagcgtgctggccgtggcggccgtgtagccgatcgcggcaaccacgctgctggcgccggctgtaaacggcaccgccacggagccgctgagcaccacgatccagccgatgaccgcgccggcgcaggacagtgtggtattgacggcttcgcccacgagtcgcgactcgcgggggttgtcttgcacctgctgtgcaaactgcgccggggcgatgtatttctgggcttcgcgcaggatcacgcgtttgggcgcaatgctgcagatcggctggaattcgcgcagggtgatgacgttgaagtcggcgtcgatgtacacaacgccggcaccgacaatcgcagggtcggcatcgatggcggcgaacaggcgcggcaggttgatctggctttcgaggcgctggcgcgccatgaactgggagcggctggcgtccatgccgatgttgagcagggggttgctcatgggtgttcttccttgagggtagtggtggccacactggcctcatcgcaggcaagccagctcccacattgatttgtgaatacattcaaatgtgggagctggcttgcctgcgatagcgatctaatgggcgccaccttaacaaacaggctatccaccggctagaaagcaaaacgccagcacgaggctggcgttttgcatattcagattgcgatcaacgcggcaccaccggcttgcgcgcaggcttgccgcccttgcccttcgccgcatcactgcgctctttggccgcctgcttgttgcgggcctgggccgcagccttggcttgctcacgcttgtcccacgggttgctgccgtcactgccgcgcggtggcaaaccggtgtgctgggtgagaatcctggtggtttccttggcaaccttgtggctgccggccggcgtcgagtttttgcgacgcgcgctctggtagctgtcggtcgacggctggtgcagcgggatcaactgctccttgcccggcccgatcaggtcggcgcggcccatacgggtcagcgcttcacgcaggatcggccagcctttcgggtcgtggtagcgcaggaacgccttgtgcagacggcgctggtcttcgctcttgacgatggccacggcgtcgctcttgtaggtgactttgcgcagcgggttcttgcccgagtggtacatcgcggtggcagtggccatcggcgacgggtagaacgcctgcacctggtcggcgcggaagtcattgcgcttgagccacagggccaggttcatcatgtcttcatcggtggtgcccgggtgggcggcgatgaagtacggaatcaggtactgctccttgcccgcttccttggtgtacttctcgaacatgcgcttgaacttgtcatagctgccaatgcccggcttcatcatctggttgagcggcccttcctcggtgtgctccggggcgatcttcaggtagccaccgacgtggtgggtcaccagctctttcacgtattccggcgactcgacggcgaggtcgtagcgcaggccggaagcgatcagaatcttcttcacacccggcaacgcgcgggcgctgcggtacagctggatcaacgacgagtggtcggtgttcaggttcgggcagatgccaggaaatacgcacgacggcttacggcatgcggattcgatttccgggctcttgcaggcaatgcggtacatgtttgcggtcgggccgccgaggtcggagatcacaccggtgaagcccggcaccttgtcgcggatctcttcgatttcgcgaatgatcgactcttcggagcggttctggatgatccggccttcgtgctcggtgatcgagcagaaggtgcagccgccaaagcagccacgcatgatgtttaccgagaaacggatcatgtcgtaggccgggatcttttccttgccgtacgccgggtgtggaatacgtgcgtaaggcataccgaacacgtagtccatttcttcagtggtcatcgggatgggcggcgggttgaaccacacatccacctcaccatgcttctgcaccagggcgcgagcgttgcccgggttggtttccaggtgcagcacgcggttggcgtgggcatagagcactgcgtcaccacgcaccttttccaccgaaggcagacggatcacggttttgtcgcgggtcatcttcgggctggccaggatctgcacgaccttggcttcttccgggtcatcaaccgggcctttttcctgttcgatggcgcaggcctgggtgtcctgggtgttcacgtacgggttgatgatcttgtcgatcttgcccgggcggtcgatgcgtgtggagtccacttcgtaccagcccgccggcgtgtcacggcgaatgaacgcagtgccgcgtacgtcggtgatgtcttcgatcttgtggccccacgacaggcgctgggcaacttcgacaatcgcacgttcggcgttgccgtacagcaggatatcggcggtggcgtcgatcaggatcgagttgcgcacacggtcctgccagtagtcgtagtgggcgatgcgacgcagggaagcttcgatgccgccgagtacgatcggcacgttcttgtaggcttccttgcaacgctggctgtacaccaggctcgcacggtccgggcgtttgccggccatgccgccaggggtgtaggcgtcgtcggagcggattttcttgtcggcggtgtagcggttgatcatcgagtccatgttgccggccgcgacgccgaagaacaggttcggctcgccgagcttcatgaagtcgtctttggactgccagttcggctgcgcaatgatcccgacgcgaaagccctgggactccagcagccggccgatgatcgccatgccgaacgagggatggtcaacgtaggcatcaccggtgacgatgatgatgtcgcaggaatcccagccgagctgatccatctcctccctgctcatcggcaggaatggcgcaggaccgaaacattcggcccagtacttgggatagtcaaataacggcttggctgtttgcatgacggtgaccggtgttgagatgaaaaatcgcgggcgcggaatatagcacaaattttgaccaattccgacgaagatagtcggttttacacgtcaataatatgtacctcagcgaccgtctatcagttgcctaaagtcccttgatcttttttcgagtgacccctatggctacccaggacacctacacctcaagcgctctactttccagtgagcgctgggccgaacttcaagcgctggacgttattcagggcaacctcaccacctttatgggcaagctgagcccggatgaacaaagggaatatttgcgacacgcaaaggagcacgccgagcgcgaaaacgccttgaggctcgcgctcaatcggttctacaacgaactcgatcaactgctggtcgatgcattggaagcggcgctcaagctcaaggtcggcaagcccgtgaacgcgcgtaccacctaccttaaaactcgcatcaggcaattgccgatccccgcgagcgagctaccggatgcagacccaaacgaccccttgggcaggcaattcggtatttccaaggaggatctcagtgttcgggagtacgaacgcagcatcaccttgctcgaggctgctcaccgcaactttggcttcaccgcgtatttctccactgaagagcaaaacgccagctacatcagtgacgatgccctgagtgttttggacttcgtcgcggtcgccaggcaaaccgatattggccaaaaggtgcaggactatatcgagaaaaatttcgcctcccgcctttctattcctttgttctcccttcacagcaccaaactgctgctggcactctacgatgcttatcgaacagacgaaccctggagcatcagcactcaggagttcaacagcctgcgcctgcaattgtccgaccggacgatcaactgggatgtgtatcaagtggatgcgggtggcgaaaaaattgcgctgccgttctacacccgacgcttcgaaacgccgaatggcccacgcgtttacagttactttcccgaccgcccgtccggagcttttcgacgtcatttttcaacccatgaagcagtggatggactgcaacagcaattgcgcaacgacgtcggactcaagcagttcaattggttcatgaaggctatttccctgaacaatcaggaaaagatccgtacctttatcaagccaatgacggtcaatcgcgacaagctctattggcatgcgcgaattctgtatgacctgttcgccagcaaaacaccgaaccggcaaaagctgctgattgaaaagttcggcgtggactcgcgctcattgatgcacaccttgcccatcgctttgtcctggccgattcaatccgacctcacgcggctggcccgcaatacccgcctcgctgaccgcgaagccgccgtagcgctgctcacgtacctggtgagtgaaaccctttcgatgctgctgattccagtgccggggggcgtgaccggcttgagcaacgccatgttggtcgccaccctcgggacgttgggctatcagactatcgaggcggtgcgggctctgcgccaagggcgtcaggccgaaatggttcaggcgctgagtgatatcctcgacctggtcataagcgctcgcatacagggcgtggccggccggctgtcgagccttcgaacccggcagttggttcgcgacctgggctacccaaaggcacacgatcgtactggtgtgtggttcatggaggcttacactcaaatcgatcccgcaaccttgcaaggacttgcacaaaacgatcagggcttgtttgaaaaagacggccagcactacatccggatcagcgtcgaagggcagaacaaagtcgccagggttcggctggatgcaacctccggtcgctatcaactcactcacaacgccgcgctttaccagccttatgtcacttaccatccgcaccacaatcgctggacactggacccgatagatacacgctccctcagcgatagccagctactgcaacacatgctcgcaccgactgacaagccgttgccgcaagcgctctgccggcgcgtgctgaaggtggccggcgtggatcgtcagcagctgctggccatatggtcggcggacgcccccgcgcactggccgttggcacaagccgtagaggaccaacatctgcgcgcgcagctcgcacggctgcaaacaagcctgaatcaacccaatacgccgctgccagttgtcgccgaccaagtactgcctgccctgttcgccgatttgagccgttgcgctatcagcctttatcagcaagacggcactacgttactgcgacgccatgaaccggtattggccaccaatgagcgcgcgctgccgtcgattgaactggtgcaggccgataacggccgctaccgcacgcgcgcgacggcatccacgcctgactcatggacgcgccaggcacttcaagagtatgagcgccagaaccccaacggcaccttgggcaagaccgggcacaacacccaggaccagcacctggacaatcgcgtgcatacactgcgcaaagcactgggtgagcacctgggcgcgcatttggaaccgatgtacctcgccatgcgcgctccctcgccccgcaggcagttgtccccggagcatgcggcttaccggttcgcaccttcgaccctggcgagtgaaacatcggttatcgccaccttgcgccgccgctttcccacactatccactgcagcggcgagcgaattggcgcgcttgcacccctcgctgagcacaggcgattactctgcgattgacgcgccagcccgcaccgcgatcaaccagcatctggcagacagcacggtcatccaggcattgggcgccctggccgaccccaccggaaccgcgctggatgcccacagccaagcgttgttctgccgcttgctgccgctggtacccggctggccggagaatgtcgccatccaggtctatcaggcagcctacgattccgccgggcgcatgatcgggcgcggcacgctgctggatacttacggcaaccctggcgccgacacgactgtcatgctggtcaaggatggcaatcgctatgccggttatcttcaagacagcgacgacctgcaattgccgccagccggcgagaacagcctcatcagtgcgaccctgcgtacactcactgacccgcaacgaaatgcgctgaagcgggggatttacgacagagagggcctggttgatgacatcctcaagcaaagccaagtgcaccgcacgcatctgcccacttttttaccgccatcgcgggagttgccgctctccagccagacgctgcaggcatttcgcgccttcgatatgcgccaagtcgcgcggcagccggatgcggacggcatccatgagataaccgggcgcaagtacgtcaacattgatcaggttgcctatcaggtcatgcttgaccgcgacgcatcaaccctcgaaggcaaggtctggcgcatcgtcaacatcaaggacccggtggccatggacagtgaaaacatctatcacagcagccgcagcggtgagaatcgggctatcactcgaaatgcgctcggactctgggtgggtgtagccgtcggcgcattgggcggtatgcgccgtacacagcgcgtgcatgacaacaaagcctatttgctgcaacggtttgagccgatcaggaacgcgttcaccacattgagtgcatcgcagatccgctacgacgaattgctgtcgcagaccaaaggacacgctcccgccagtgagcccgaagcagcggccttgatcgccctggaagtacacaccctcaaacacaccaagctgcaggagagctacgtcaatgcattgatcgaaaacaaggaatggttggttcatctgaaggcaggcggcctgtacaaagaagaattgctggtccaactgcacagtcgcgtcgacttcctgaacaaactcatgggcatcatggacttgcgcattcgcccgatcatcgagaaagaaatcacgatcgaaacctgcaaaaaaaatctcgcgcacatgaataaaaaactcacatttcttaaagaccgccaacgcgtgatcgagcagacccgacgcatttcccgctcggatgccgatgagatgacccgaacgaacagcgcttaccctggagaagacgaggttcaggtgacgcgcttcaacgtgtttaaccgcctgctggtagatgacccgaacgaccctccgtctttcagtatcaataccgctatatctctccaatggacagttaaagaactacacctcattcccgaacgctcccggccagtcgccttgagcatggtgcttgatcagatcgcggtggacaggcccaactatgccgcactgctggataccgcaacctctgaaaagaaggactatatccacggcattctggcgatccttgactcgcatgaaacgacgatcaaccacaaactcaacgagttccagagcaagctcgatagcaaccaagacctgccggcctatgatcaagacatcgatttcgacttcataccggcacaacccactggttcaaccgaggttgcccaaccccgcaaggtgttcagaacccggcgcaatggtcgctacaaaatattggtggggaccacagagacggcaacggacggcaccgtgacggtgaaggtcgatgacccgtacacaatgggcgcgcgccctcaacgatatgaaaaacgactgggcgagtggcaacgcgtactctcaaggggcagtctgccagccaaatcgcagttggtcagtgaggctaatgagcagttggccaaggttgatgagcaccttgctgtggctcgcctcaacgaaaggaaaaagtattacccaacgaatgtctacgaattcctggggagcaaggctgatctactcaatgagctggcagccaagttggaaagcgccgacaaggaatcgaacaatatcgcccccctgatcacacgtctgaaggcaggcagcgaatccctcatgaccgaagggcgcagcattttgatccgaatgtacaagaacaaggacgtgctggatgtgttgcgagtggactatctgctcaatcacgcccaactcaacgtggtcaagacggtgaatcgcaagccgttgggcaaaggcaaggaacgctcgtttctggacgtctactcaatcaacaatggcagcgacgacacgcccttgtgggaggcgcacttccattacgacaggctggaccgcgcccccttggactacacgaccaaaggtggccacttgaaaacccttgcacaaagccgccaaggcagcagccaccagcagggcgaagaacaggccgggcacgcgcatcaagctatctggcgtgaagccattagccccaaggtcgcacagaaactatttgcccgcgcccagtaaacccgcctcggccgtgcgggttactcgtcatcgaagttataactgcccggcgcgaggttctcgaaacgggtgtatttgccgataaacgccaggcgtgctgtaccgatcgggccgttacgctgcttgccgatgatgatctcggcgatgcccttgtgctcggtttccgggtggtacacctcgtcccggtacacgaacatgatgacgtcggcgtcctgctcgattgctccggattcccgcaagtcggagttgatcgggcgcttgttcggccgctgctccagggagcggttgagctgggacaacgccaccaccgggcagttgaattccttggccagggctttcaacgagcgggaaatctcggaaatttcgttggtccggttgtcgccaccggaacccgggatctgcatcaattgcaggtagtcgatcatgatcaggccgacgtcaccgtgttcacgcaccaggcgccgggtgcgcgcgcgcatttccgaagggctgatacccgcggtgtcatcgatgaacagcttgcgatcgttgagcaggttgaccgccgaggtcaggcgtggccaatcgtcgtcttccaggcgacccgcccgtactttggtctggtcgatacggccgagcgacgagagcatccgcatgatcagcgattcacctggcatctcgagggagtacaccaacacggctttttcgctgcgcaacaccgcgttttccaccaggttcatggcgaaagtggttttacccatcgacggacggcccgcgacgatgatcaagtcggccggctgcaggccgctggtcatgccatcgaggtcggtgtagccggtggacaggccagtgatggcgttgtcggtgttgaacagcgtatcgatacggtcgatggccttggtcagcagatcgttgacgccgacgggcccgccggttttagggcgggcttcggcgatctggaagatctgccgttcggcttcgtcgagaatctcctcggcggtacgcccttccgggttgaacgcgctgtcggcgatttcagtggcaatgccgatcaactggcgcaaggtggcccgcgcgcggacgatctgcgcataagccttgatgttggcgaccgacggggtgtttttggctaattcgccaaggtaaccgagaccgcccacctgcgaggtctgaccttccttgtccaattgctcggcaagggtcacgacgtcgatgggggagttcaggtcggccagcttggcgatggcacggaagatcaggcggtggtcatgccgatagaaatcgccgtccgagacttgatccagcacgcgttcccaggcgttgttgtccagcatcaaaccaccgagcacggcctgttcggcctcgatggaatgcggcggcaccttcagggcagcggtttgcagatcgtattgctcgggagctgaaatatcgttcatggccacttggaattagggggttgtagaaaaacaaaaggcacgacctgtaaacaggatcgtgcccgatgttaaccgcctggcacgcgaggtgccagtcagttaggtgcgacttaagctgctaccacgacaacgcgtacggtggcttcaacttcggcgtgcaggtgcacggctacgtcgaattcgcctacgttgcggatggtgccgttcggcagacgaacttcgctcttctgcacttcaacgccggaggcggtcagtgcatcagcgatgtcgtgggtgccgatcgaaccgaacagcttgccttcgtcaccggcggtggcagtgatagtcacttccagctcagccagttgggcagcgcgagtttcggccgaagcttttttgtctgctgctgctttttccagctcagcacgacgctcttcaaacgcagccaggttggcagcggttgcagcggtggctttgccgtatggcagcaggtagttacgaccgtagccggccttaacgttcactttgtcgcccaggttgcccaggttggcgactttttccagaaggatcagttgcatgtgaaaatcctctaacttttaaccttcaccgttcgcgttatcggcgtctttcggcgccagacgaccgcgaaaatcaatcaggccgtcgacaatggccaaaaccacgagtaacggatagatcagctgcatgaacagcaacagcgtgacgtacaaccccaccagccagaacctggccaggcgctttcgcgcaaccagcccatgaatcagggccagcccggcaaacaccagcggtacgctgcaaatcggcgccagcaaggccatctgtgggccgaagttcggcccgacaaccatgcacgccagcagcaacatcgccggccccgcagggattctgatactgcgaaattcgcgaccaaaaccacccgggttgtacaacaacgcctgccaataacgcccaagaatcaggctcagcacgctgacaacctgcaacaaagccgcaatcaggccggtcaggaccggggcaatcagtgacgcaaaccgcgctcgctcatctaccgacaactgctggtagagatccccgagggccatcggcaggatcttgacgatctcttgcgacagcgcttcgatttgcgggcggaaagccgcgccaagcatcactgagtacaccaaccccaatgccacgctgaccagcagcgtgcggacccaggactcacttgcgcgtaaaaccaacgcaaggctcgatgaccccagcagtaccagaagtacccgtggatcaccgaattgcagccaccagatcaaggccggcagcaatcccagggcaagaacgccaagagcgtccttcaaaccgcgccgcaggagcacaaggcaaccggcggcagcacccaaccaataaagcaacggcaatgccgcacatccagccactaccagagtggcctgcacgcgaccgcgcatgatgaactcagctaaggcgcgcatgcattcaatcccttactacttgtcgactgcccggtctcagcggccgtggctgtcggtgtaggccagcagggccaggaagcgggcgcgcttgatagcggtggccagctgacgctgataacgtgctttggtaccggtgatacggcttggaacgattttgccggtctcggatacgtaggctttcagagtgttgagatctttgtaatcgatctctttcacgtcttcagcggtgaagcggcagaatttacgacgacggaagaaacgtgccatttgataggctccttaaaaggtccgtggattactcgtcagcgttatcgctgttgtcgctgtcatcactatcagcgctatcagcgccttcgtgctcaggacggtcgcgacgctcacggcgctcactgcggttttcttcagccttgagcatctcggattggccggtaacggcttcttcgcgacggatgaccaggttacggatcactgcatcgttgtagcggaagttgtcttccagctcggccagggccttgccagtgcattcaacgttcagcatcacgtagtgagccttgtgaacattgttgattgcgtaggccagttgacgacggccccaatcttccagacggtggattttgccgccgtcttcttcgatcagcttggtgtaacgctctaccatgccgccgacttgctcgctttgatccgggtggaccaaaaagatgatttcgtaatgacgcatgaatgctccttacgggttgtagcctgccgctcaaaaacggtcagacaaggagtgaatgacacttatggatcttgccgcaaggaggcacattggtgcctgccaggaaggcaaggggcgcaattgtagagaagggggagaaacggcgcaaggtgattggtgattatttgaacaatcacccttttctcaaacccgacacaaaacaaatgtgggagctggcttgcctgcgatagcatcaccccggtattgctgaaaagaccgaggtgtctgcatcgcaggcaagccagctcccacacaagccagctccaacatttggaactgcgccagaccggattatttcttggtcttggccttcgcaccgcgctggcgctgggcttcaaacaggcacacgcccgtggcaaccgacacgttgaggctgctgacgctaccggccatcggcagcttcaccaggtagtcgcaatgctcgcgtgtcaggcgacgcatacccttgccttcggcacccatgatcagaatggtcgggccggtgaggtcctggtcataaatgctgacttcagcctcgcctgccgtgcccacaacccacaggccgcgctgctggagtttctccagggtgcgcgccaggttggtcacggccaccagcggaatcacttctgccgcaccacacgccactttacgcaccacgggcgtcagggtagcggacttgtctttaggcacgatcaccgccagcgcgccggcagcatccgccgaacgcaggcaggcgccgaggttgtgcgggtcggtcacgccgtccagcaccagcaacagcggagcgccttcggtacggtcgagcagctcgtcgagcatcgcctcgccccacacctggctcgggctcacgtcggccactacgccttggtgaacgccttccacccacacgtccatttcacggcgctcggcttgaccgatggcaaccttgttttgtgtggccagctcgaccagcgcttgaacgcgcggctcgctgcgaccttctgccagccacacctgcttgacgcgtttagggtggtgacgcagcagtgcttctacggcgtgcacgccgtagattttttccagactcatgacttggccttaggtttgcgcgacccaccgcttttcgcgggagccgaacccgctttaggcgggcctttacggtgtttacttggcttgctcgacggattttccgccccgcgggactttcccccagacgccgctttaccaccgcttttggcttcgttaagcaactgctgcttcaactcgcggctcttgcgcacttcagcatttttcgctgctgcgtcgcttgggcggtaggcttcgggggccttttccttggtggacgtgcgacgaccagccttggctggcgcaggctcgacggctgccgctttcgcgggcgcccctttgcctttgctggctggcgccgcagtctcgctgccacgctttttacggctgcccggcgcttcggcgggcttgtcaggcatgccgaagtcgatcttgcgctcgtccaggtcgacgcgcatgacctgcacttccacggtgtcgcccaagcggaagctgcgaccagtgcgctcgcccgccaagcggtgatgcacaggatcaaagtggtagtagtcacccggcaaggcggtgacgtgcaccaggccttcgacgtagatgtcggtcagctcgacaaacagaccaaagccggtcacagcggtgatcacgccagggaacgtctcgcctacgcggtctttcatgaactcgcacttgagccagttcaccacgtcgcgggtggcttcatcggcgcggcgctcgctcatggagcattgctcgcccaattgttccagagccgcttcgtcgtacggatagatccgtgccttcggaatggtcatggcaccggcgcgctggacgtgcggggtgttttgcttggagtgaatcacgctgcggatcgcgcggtgcgtgagcaggtccgggtaacggcgaatgggcgaggtgaagtgtgtgtacgcctcgtaattcaggccgaagtgcccctgattatcagcgctgtacaccgcctggctcagggaacgcagcatcacggtctggatcacgtggtaatccggacggtccttgatgctggccagcaaagcctggtagtccttcggcgtcgggccatccttgcctttgtgcagagacaggccgagctcaccgaggaaggcgcgcagtttttccaggcgctccggcggcgggccatcgtgcacccggtacaacgccggaatttcgtgttttttcaggaactcagccgtggccacgttggccgccagcatgcactcctcgatcagcttgtgcgcatcgttacgggtggtcggggtgatcgcggcaatcttgcgctcggagccgaagacgatccgggtttcctgagtttcaaaatcgatcgcgccacgcacgtgacgggcccccagcaacactttgtacagcgagtaaagctgcttgaggtgcggcacaacgcccgcgtattcagtacgcagggccttggcttcgctggtcttcggcgtttccaggatggtgctgaccttgttgtaggtcaggcgcgcctgggagtgaatcaccgcctcgtagaactggtagtcggtcatttcgccggttttcgagatagtcatctcgcacaccatggccaaacggtcgactttcggattcagggagcacaggccgttggacagctgctcaggcagcatcgggatcacgcgctcggggaagtacacggagttaccgcgcacttgagcttcgttgtccagcgccgaaccgatcttcacgtagctggacacgtcggcaatcgcgacgaacaacttccagccgccggagaacaggcgcagtttgccaggcttggcttcgcagtagaccgcatcgtcgaagtcgcgggcatcttcgccgtcgatagtgacgaacggcagatgacgcaggtcgatgcgtttctctttgtctttttcttccacttgcggcttgagcttggcggcttctttgagcaccgcctcaggccagacgtggggaatatcgtaggtgcgcagcgcaacatcgatttccatgcccggcgccatgtagttgccgaccacttcaacgatatcgccttgcggctggaaacgtgccgttggccagtgagtgattttcacctcgacgaactggccgaccttggcggcgccattgcggcccggggtaatcagcacttcctgctggaccttcggattatccggcacaacaaagccgataccgccttcttcgaagtaacggccgacgatggactcgtgggcgcgagacaccacctcaacgatcacgccttcacggcgaccacgacggtccaggccggaaacgcgtgccagggcgcggtcgccatcgaacaccaggcgcatttgcgccgggctcatgaacaggtcatcgctgccgtcgtccgggatcaggaagccaaagccgtcacggtggccggcaatgcggcccaggatcaggtcaagcttatccacaggcgcgtaagtgccacggcgggtgtagatcagttgagcatcgcgctccatggcacgcaaacggcggcgcagggcttcgagctggtcttcggtggtcagaccgaattcttcaaccaactgctcgcggctagcaggcgaaccccgatcggcgaggtgcgccaggatcagttcgcggctaggaatagggttttcatatttttccgcttcacgagcggcctcgggatcgagggactgccaatcggccattagagagttttcaccttgtctatatgcgggttagtttggcatacgcgtattgaaacgggaaatttcaggcatcaacaagcgtttaaaagccttttgcagccccaggcaagcaccttgcacgaccactggcgaaattttccagggtttttgcgtggcgggggtttacagctcaaaaatcgctccgtatagtgcgcgccatcgacgacggcaacgttgttgatgctgcccaggtggtgaaattggtagacacgccagcttcaggtgctggtgatcgcaaggtcgtggaagttcgagtcttctcctgggcaccaaattcagatcaaacccgcgaaagcgggttttttcgtttcaggcctttgatttttaaagcaaaacccgatttattttttcgaatcaggggtttacagatcaaaaagccctacgtatagttcgctccatcaacggcgcaagcgctgatgataaatgcccaggtggtgaaattggtagacacgccagcttcaggtgctggtgatcgcaaggtcgtggaagttcgagtcttctcctgggcaccaaattcagatcaaacccgcgaaagcgggttttttcgtttccggggtttgaaaaccttcccgccgattcaccccctcgcccgcacttgagaagttttatcgtttatccttgcaatgatttgttgcacacaagcgaggaacaacccggatgatgatccgcgatacccgtctcaagacatcccttctgcgtggcctgaccctcactctgctcggcctgactctactctcgcccgccgcctattctgccgacaaggtctcgctgaccctgtacaacggccaacacaaagaagttggcgatgaactcgccaaggccttcgaagccaagaccggcatccacgtcaacgtgcgcaaaggcagcagtaaccaactggccagccaggtcgtggaagaaggcgaccgctcgcccgccgacgtgatctacaccgaagaatccccgccgctgaacaaactcggtgaacaaggcctgctggccaggatcgacgccagcaccctcgacgtattgcccaaggactacgttggcaccaacggcgactggatgggggtgaccgcacgtactcgcgtcgtggccttcaacccgaaactgattgcagagaaagacctgcccaagtccgtactggatttcgccggccccgagtggcaaggcaaggtcggtttcgtacccaccagcggcgccttccaggaacaagccgtggcaatcatcaagctgcacggtcgcgaagcggccgaagaatggctgaccggcttgcgcgcgttcggcaaggtctacagcaacaatatggttgccctcaaagccgtggaaaacggcgaagtggctaccgtcctggtgaacaattactactggttcgccctgaagaaagaaaaaaccaacctggattcacaactgcactatttcaccgacggcgacgccggtggcctgatcaccgtgtcttcggctgcggcgctgaaatccagcaagcaccccaaagaagcacaacagttgcttgccttcatggccagcgaagaaggtcagcgcgtgatcaccaacacttcggccgaatacccgttgcgcaagggcatggaatccagccgcggcctcaagcctttcagcgagctgcaaccgccaaaaatcaccccggcagacctgggcaacgccgaaggagccctggacctggaacgtgacgttggcttgaactgatgaacccatcgctacccgcccccgccctgcgcggggggttgagccgaaggcgcaagcgcccgtcgatctggctggtgctgcccgtgctgtttctggttggcttgagcctgctgccgctggtgtatgtcgcaaccaaagcctggcaggccggctggtcagaagccgtacacttgctgtggcggccttatgtgttcgggctgttgcgtaacaccctggcgctgatggttggcgtgaccgtggcctgcggcgtgatcggcctgtccctcgcctggctgctggagcgcagcaacctgccggggcggcgcctctggggcgtgatcttgtgcctgccgtttgcggtgccggcatttgtcagcagctttacctgggtgtcgttgagcgccaactttgaggggctcggcggggcgattctggtgatgagcctgtccaaatacccgctggtttttttgccggtggcggcgacattgcgcaatcttgacccctccctggaggaatctgcccgcacgcttgggttgaatcgctggggcgtgttctttcgcattacgttgcctctgctgtggccgtcgctgctggccggcgcgctgctgatcgctttgcacatgctggtggaattcggcgcactgtcgatcatcggcctgcagaccttcaccaccgcgatctatcagcaattcgaactggaattcagcaatgccaacgccgccatgctgtcggcggtgctgctggtgatgtgcctgacgctgttgtggctcgagctgcgcgtacgcggcaagggccggcatgtgcgcatcggccagggcgcggcgcggcacgccgaacaagttcggctggggcgctgggcgccagtggggcaactctattgcctggcgctggcgatcattggctccggcattccactgggaatgctcggttattggctggcggtgggctcgtcggcggcatttccggcggccgagataggtgaggcgctactgtcctcgctcgcactttccctgggtggcgctgcgttttgcctggtattggcggtgccggtgggtttgctggtggtgcgctacaaaggccaactggcgatctgggccgaacgcttgccgtatttgctgcacgcccttcctggcctggtgattgcgctgtcactggtgtatttcgcactgcactacgtgccggcgctttaccagacctcggcgctgctgctgattgcttatgcgctgttgttcttgcccctggcccaggcaccgattcgaacggccttgaacaaggctgcgccgcaactggaagaggcggcacgcaccttgggcgcatcgtcgttcagcgcgttttgccgggtgaccctgccgattatcttcccggcattgggcgcggcttttgcgctggtattcctggatgcaatgaaggaattgacggcgacgttgctgctcagcccgaccgggctgaataccttggcgacagccgtgtgggcgcacacctcgaatgtggagtttgcagcggcggcgccttatgcggcgttgttgattctggtgtcggggctgccggtttatctgcttacaacccggatgtatctgagccgttaagaccgctatcgcaggcaagccagctcccacacttgaccacattccaaagctggaactcggtcaagtgtgggagctggcttgcctgcgatggggccagtacagatatcgctaagccctgaactgccccagactcgccttcaactgcgccgccaacccatccagcaccttgccactgaccgtggtttccaccaccgcctgcgccgcacgctcggcctgggcatgaatcacctcgacccgcccacgcaccgcatgcgcgcctttagcctgatgctcagccgcacgcgtagccaggccaatagccgcatgcacctgctccaccgacgcctgcaccgtctgttgcaaacgcacactgtcacgcagcaccagcaacccttcgttcgcctggcgccccgctttgctgatggtttccaccgcttcgcgcgcaccctgctgcaatgccacgatgtgtgcctggatgtcgccggtagagctttgggttttgctggccagcgcacgcacttcgtccgctaccacggcaaaaccgcggcccgtctcacccgcccgcgcggcctcaatcgcagcgttcagggcgagcaaattcgtctgttcggcgatgccgtgaatcaccgtcagcaccacttcaatctgctggctttgctgcgccaggcgctcgatcactgtggacccggcctgtacctgccccgccagcgcttcgatcaggctgccgacctgcgctgaagtccgcgagttctcatctgtggcctggcgaatatccaccacctgctgcaacgccgcctgcattgcatggctttcggcctgggcctcgtcggccatttgcgacagtgcacgcagactctcagccacttcatcacgctgcaaaccggccgccgcatcggcaccggcattacgcagggtcatcgcgccgatttccacacccgtgcgctgggccacgtcacccgcctcgcgcacgatcggttgcaacttatccacaaagcgattgaccgccgaggccatgtcgccgatttcatccttgctgttgatctgcacacgcttggtgaggtcgccctcgcctgccgccaggtcatccatggccgcaatcaacagtttcagacgattgaccacgcgacgccccaacacaatggcaatcaacagcaacacacccaacccgacaagtgcgagccccatgccgatgcgccagcgcaaagtgccagcggcctcctgcacggcgccagtggtattggctgtcatctgggtagcggtggcttgcgccgattgcagccgcgcacccatggctgccgcactgtctgctgcggcgccttgcaggctgtcgccaaccaactgatcactgctggcaatcagcgcggcgaagcgcttatccagcgctgcaaggtcagtctcgaccgacgccgtcgacacccccatgcggaccttgccgatttccaccccgttagggctgatggacgcctcaacgtagtacaccgacgggtcatccttcgccgcattcaacactttatccagggcacgatcaccctgccctttcgccagcaaagcctgattgatcgggttttcgcggttcaggtaacgggtcaaatgctcgcccgctgcgtcgtcgtagaccacgaacaacacattgggattgcgctgggcacgccgagcaaactccgacagcgtcggcacgtcgctgtcccacatggcgcgcggcgccaccgaggcgagcagttgcgccatgtcattggctgagtcttgcaggtctttttccagggtcgcacgcagttgcttctgttcatcctgcaaacgcgacgacaagcctgcggtaagacgctggcgggtgctggacgacaggttgtccaggctggatgtcacttccttgccggcttgcgccaactcgccagacaacttctggctgtcgacacccaggcgattgcccaaatcagcttccagcgccgtgacggtgctccgcgtcagcgcgacggccaccagtacttgcaccaaaagggcgatacctagggtaacgaacaccggccgcaacagccggctttgtaacaatgagagaacggcagacactgggaatccctccaccacgggtgccattaaattgatagcaccgcgaaagaaagaacaatagcaagggtcgtgccgtttaccagccagaaacgacaaagggcccccgaaggaaccctttgctttttacatcaacaacttattaagcgaacggatgacgcagaacgatggtttcgttacggtccgggcccgtcgaaataatgtcgattggcgcgccgatcagcgcttcaacgcgcttgatgtacgcacgagcgttcgccggcagctcttccagggtcttggcgcccacggtcgattcggtccagcccggcacttcttcgtacacaggctgcaggcctacgtagctgtcagcgtcagtcggcgcaacgtccttgccctctgcatctttgtagccgacgcagatgttgatggtttccaggccgtcgagtacgtccagcttggtcaggcagatgcccgagatgctgttcacatcgatagcgcgacgcaggatgacggcgtcgaaccagccgcaacgacgcgcacggccggtggtggcgccgaactcgtgaccttgcttggccaggtgcgcgcccacttcgtcgaacagctcagtcgggaacggaccggaacctacgcgagtggtgtaagccttggtgatgcccaggatgtagtccaggaacatcgggccaacgccggaaccggtggcaacgccgccagcagtggtattggagctggtcacgtacgggtaggtgccgtggtcgatgtccagcagggagccttgggcgccctcgaacatgatgtctttgccagcgcgacgcaggtcgtgcagctcggccgtcacgtccagcatcagcggcttgagcagctcggcgtattccttgcactcggccagggtcttttcaaactcgatggccggttctttgtagtaaccaaccagcatgaagttgtggtagtccaccagttcacgcagcttgtcttcaaagcgcggcatgttgagcaggtcgcccacacgcaggccacgacgtgcaaccttgtcttcgtaagccgggccgatgccgcgaccggtagtaccgatcttcagctcgccacgggccttttcacgggcctggtccagcgcaacgtggaaggacaggatcagcgggcaggacgggctgatacgcaggcgctcgcgcaccggtacgcctttctcttccagcttgatgatctcgcgcagcagggcgtctggtgcaaccaccacgccattgccgatcaggcactgcacgccttcgcgcagcacgcccgacgggatcaggtgcaagacggttttttcgccatcgatgaccagggtgtggccagcgttgtggccaccttggtagcgcactacggcggcggcatgttcggtcagcagatcaacgatcttgcctttgccctcatcaccccattgggtgcccaggactacgacattcttacccataacacttgtcctcattcgcgcaaacttggtgccggcgatggccggcaggaaaactcaagaagccagtggcgatacttgccaaagcccgttctgcagaatcaattgccggtcgcagtccgcttcacgggcggcggccaatggctgcccaggcaacgcctggacgacacgctgaccctcactgcgcaactggcaaacctgctgccagagtgccgcgtccgtactgtcgggcatccagatgccaccagacggcagctcgacctcagcacgccccagggtcaccagggttttcaaatcggtggaaaagccggtcgccggacgcgcgcgaccgaagtcggcgccgatatcgtcataacgaccgccttgggcaatggcctggccaacacccggtacaaacacagcgaacaccacacccgtgtggtagtggtaaccgcgcagctcacccaggtcgaagtacagcggcagttccgggaaccgtgccgacaactgctcggcaatcgccaacacatcatccagagcggccaagactggcgccggcgcattggccaggcgctcacgcgcggccaccagcacttcacggccaccgcacaggttcaccagcgcacgcagcatgccggcgaggtccgcaggcacaccctcggtcagggcgataacttcatcgatggccttgcgttgcagggcatcgaacagctgttgctccacttcaccggacaagccggccgcgcgggccaggccacggtagataccgacgtgccccagatccatgtgcacatccggcacgtcagccagttgcagcatggccagcatcaagctgatcacttccacgtcgctgctcgggctggcgtcgccgtacaactcggcgcccaactggatcgggctgcgcgaagacgacaaggcccgtggctgggcatgcagcacgctgccggcatagcacaggcggctcgggccttcacggcgcagggtgtgcgcgtcgatgcgcgccacttgcggggtgatgtcggcacggaagcccatttgccggcccgattgcgggtcaatgaccttgaaggtgcgcagatccaggtcctggcccgctccggtcagcagggattccaggtactcgatatggggggtcacgacgaactcgtaaccccagctctggaacagatccaacacctgacggcgcgccacttcaatgcgcgcagcttccggtggcagtacttcttcgatgccatctggcagcagccagcggtctaccgttgccattacgccattcccctatgatccgggcggccagccctcggccgagccttgagtgaagcagaaaatgccctgcataaacaacgcgcaagaacgacgtgacgaaatggcctgccagcggcctcgtcgggcactttcctcgaaaaatctgtggcgcctgcggcgcaaaacaacaatcaaacgtgcagacgcaaaaaagccgggaatttcccggctgccgcatcatacacccgttttctgaaaggatcaccccgccaggcgttttagccgcccgacggagtgggtcctacacagtgacgagttgattacttggctttttccaggtagcggaagaaatcgctacttgggtccagcaccatgacgtcggttttattcgcaaagctttcacggtaggcacgcaggctacggtagaacgcgtagaactcctggtcctggccgtaggccttggcgtagatcgccgcggcttgagcatcgccatcaccacgagcctcttcggactcgcgataagcttctgccagcagtacacggcgctgacggtcggcatccgcacggataccttcagccaactcgttacctttggcgcgatgctcacgggcttcacgctcacgctcggtgctcatacgctcgaacacgctgcggtttacttctttaggcaggtcgatggccttgacccgaacatcgatcacttcgatgcccagctctttttctgccatggcgttcaacgaacgcgtgatgtcagccatcagcgcgtcacgctcaccggataccacctcgtgcagggtgcgcttaccaaactggtcacgcaggcccgactccagacggcgcgacaaacgctcgtcggcaatctgcttgaggccggaagtcgcggtgtagaagcgctcggcatccttgacgcgccacttggcgtaagcgtcaaccatcacggctttcttttccagggtcaggaagcgctgtgtcggtgcatccagggtcatcaggcggccatcgaacttgcgcacctggttgacgtaggggactttcacatgcaaacccggctggacatccgcctggaccacacgaccgaattgcagcaacaccgcgcgctcggtctgagacacgatgtagaagcagttccaggcagcgatgaccacgacgacacccacaatcagggctgtcagcgatttattgctcatcaacgactctccctggtacgtgtttgctgttgcagcaagtcagcggccgcacgggcgctcgcttcgttggcagcggcattcgaactggtggacggcgcgctggtaccgctacggcccccttcgatcatcttgtccagcggcaggtacagcagattgttctgcccacccttgctgccggtcacgagaaccttgctggtgttgctgaagacttcctgcatggtgtccaggtacagacgctcgcgggtgacttcaggtgccttgcggtactcggcaaccagtttggtaaagcgatccgcctcacccttggcgcgggagaccacttcgtcgcggtaaccgttggcatcttcaaggatgcgctgggcctgaccacgggcttccggcacgacgccgttggcgtaggtttcagcctggttgcgcgaacgctgctcgtcttcacgggcacggatcacgtcatcgaaggcttcctgcacttcgcgcggtgcagctgcgctctgtacgttcacctgagtaacagtgataccggtgcgataagtgtcgaggaaccgttgcaggcgctccttgatctcgctggccatcaattcacggccttcggtcagcacctggtccatcgcggtagaaccgacgacgtggcgcagggcactttcggtggcgtgttgcaggctgatttccggctgatcaacgttcagcacgaagtcctgcaggttgctgatcttgtactgcacggtcagcggcacttcgacgatgttctcgtcttcggtcagcatctggccctgcttggtgtaggcacgctcacgcgtgacgttctccatgtacttcttgtcgatcggcgggaagtagatgttcaggcccgggccgacggtttcgtagtacttgccgaagcgcagcacgacggcctgctcctgctcgtccacgacatacacggcgctgtacagccaaaccgctgcgagcacgacaagccccaggcccagcaggccatagccaccgcccttgcttgtgcgaccgccgtcgtcaccaccaccacgttttttcccaccaccgaacaacccattcaggctttcctgcagctttcggaaggcctcgtcgagatccggtggccccttgcggtcgccgttattgcggcgcttaccaccccaaggatcctgattattcgagttgccacccggctcattccaagccatagcgctctccatctgataaagcaaagacgcacccacggcgcgccgaccaatgctacagaatgcctgctactgcggcacaaccgctttcggaggcttttattgcaaagtgtgttgttcgatgaactctgtcggtaccacaccttcacgactgaccagccgattcagctccgagcgcggcaatcgaacggccagcaagctgaccccttcttcgtcgtattcttctttctgtactgcgcccaactcgaaaaactgtgcacgcagtcgagcaaaacgctgcggcaagcgcaaggtgccgacaaacaaatcgctgcccaacagctcggcaatggcttgctcaagcaattccaggccgctgccatctcgcgccgacagccagacccgctggggcttgccgtcttcattgcgctggatttgcggctctaccccttcaagcaaatcgagtttgttatagacctccaggatcggcaagtcctgggcaccaatctcgcccagcaccagcatcacctgctcgatctgcaacatgcgatccggctcggccgcatcgatcacgtgcaacagcaggtcggaattgctcgactcttcgagcgtagaccggaatgcctcgaccagcttgtggggcaaatgacgaatgaaacccacggtatcggccagaacgatcggccccaggtcgtcaaggtccagacggcgcagggtcgggtcgagggtggcgaacagctggtcggccgcgtacacgtcggacttggtcacgttgttgaacagcgtggatttgccggcgttggtatagcccaccagagagacggtcgggatatcggcacgggagcgaccacggcgcgattgctcacgttggctgcgcactttttccaggcggcccttgatctggcgcaggcgtacccgcaacagacgacggtcggtttcgagctgggtttcaccggggccgcgcatgccgataccgccaccttgacgctcaaggtgagtccagccgcgaaccaaccgcgtgctcatgtgatcaagctgggccagttcaacctggagcttgccctcatgggtacgggcgcgttgggcgaaaatatcgagaatcaagccggtgcggtcgatcacgcgacactcgaaaactcgttcgaggttacgttcctgactgggcgtgaggacgtgattgaagatcaccagatcggcttcttcggcgtgaaccaggtcgcgcaactcctcgaccttgccgctgccaatcaggaatttggcggttggccgatgacgcggcacgttaaaaaacgcaacggtctcggcgccggccgaatttgccaactcctgaaactcctgcggatcttcgcgcgcctcagggtcctgtccatccaagtgaacgaggattacccgttcaccaccaccgtggcgctcaaagaacaaaggagactcctatcaggcgttacctggctcagcatcacccacttcatcaccggctgcgctaggcagacgaattggacgaacggggacgactgtcgagatagcgtgcttgtaaaccatctggctgacggtgtttttcagcaggatcacgaactggtcgaacgactcgatcgtgccttgcagcttgataccgttgaccagatagatggaaaccccaactttctctttacgtaaagtattcaagtaagggtcttgtagcgaatgcccttttgacatgtgccgcactcctttaaggatcaataataaaattcggaaaatagatagcttatggccgtcacacccccaaggatagacggcaattgcaaggactcagctcaatatggagaccgttcccaggtatttcaaggcgcgtgacagattgtcgctgtccaggctgtccagccagtgcaaatcgctccagctgcgcaaccaggtgaactggcgtttcgccaattggcgcgtggcaatgatgccgcgttcctgcatctcggctgacgtcagcttgccatccagataatcccagacttggcgatagccaacagcacgtatcgaaggcagccccgaatgcaggtcacctctggaacgcagtgctacgacctcgtccacaaacccctgttccaacataattgtgaatctttgtgcaattcgttcatgcagcacctggcgatttgccggagcgatggccagattcgccacagtatagggcaattgtgactgaccagaggcgcctgcatcagcactttgcgcagtttgtttcagcctgtgttcagtcatggtctggccgctcactcgccagacttccagagcgcgcgtcagccgctgggggtcattagggtgaatgcgcgcagcggacaccgggtcaactgccgccagttggtcgtgcagggcttgccagccaaggcgtgcagcctcttcttcaagttcggcgcgcacctgggcatccgcgggcggcatatcggccaacccctcctgcaaagccttgtagtagagcatcgtgccgcccaccagcagcggaatattgccccgcgcggtgatatcggccatggcggcaagggcatcggtgcgaaaatcagccgccgaatagctctgcgacgggtcaataatgtcgatcaacttgtgcggatgctcggccagcagcgcttttgaaggcttggccgtgccgatgtccatgtcccggtaaaccagggcagagtcgacgctgatcagctcacacggcagcactttggtcagctcgatggccaggtcggtcttgccggccgccgtggggcccatcaggaagatcgcggggggcaaggcactcatcagcggccgcgcaagaacagtttgtccagatcgtccaagcccatctgggtccaggtcggtcggccatggttgcattgcccgctgcgctcggtgttttccatgtcgcgcagcaaaccgttcatttccggcaacgccaggcggcggttggcgcggatcgcgccgtggcaagccatggtcccgagcaactcgttgatatgcgcctgaatacggtcgctggtgccgtactccatcaggtctgccagtacgtccgccaccaaccggttcgcttcagcttgcttgagcagcgcgggaatctgacggatcgccagggtttccgggcccaggcgttgcagctcaaagcccaggctctggaacacgctggtgtgttcttcggcacaatcggcctcacgctggctcacggccagggattcgggcaccaatagcggctggccgctgaggccttcgctggccatggcgattttcaggcgttcatacatgattcgctcgtgagcggcgtgcatgtccaccagcaccaggccatgggcgttttccgcgaggatgtagatgcccttgagctgcgccaaggcataacccagcggcggaatatccccgccaccttccggcaaggccacggcggcaccgggttcggcacccggcagcggcgcaaaaaattcgcgataagccgcctgggcctcggccaccggcactgtcgattgcgggcgcggcgtgtattgatactgataacccgcccccgaacctgaaccgggcgcagtgtaggaaggctgcggctgcggcgattgcagcagattggctgccaggctcatttcgccctgtgggccaaactcacctgcctgcgggccacttggccgcaccacggcggtcacaatcggcgccgacagttggtcatccggccgtacatcacccagcgcgcggtgcaaagtgccatacaggaagtcatgcaccatgcgcccgtcacgaaagcgcacttcgtgcttggtcgggtgcacgttgacgtcgaccaccgacgggtcaacttcaaagaacagtacaaatgtcgggtgccggccgttgaacagcacatcgcgataggcctggcgcaccgcgtgggctaccagtttgtcgcgcaccgcacggccattcacaaagaaatactgcaaatccgcctggctgcgcgaaaaggtcggcaaacccacccaaccccacaggcgcaggccattgcgttcgatttcaatcggcagcgcctgctccaggaaccccgagccgcaaatcgccgagacacgccgggcgcgggcggcatcgtcgtgggcttcatgcaggctgaggatggtcttgccgttgtggcgcaagtgaaacgccacatcaaaacgcgccagggccaggcgtttgatgacttcctgaaggtgatcgaattcggtcttctcggccttgaggaatttgcgtcgcgccggggtattgaagaacaggtcgcgcacttccaccgaagtgcccaccgggtgagctgcgggctggacccgtggcgccatgtcacggccttcggtctccacctgccaggcctgctcggcactgcgcgtgcgcgaagtcagggtcaggcgggccacggagctgatcgaagcgagggcctcaccgcgaaagcccaggctcatcacccgctccagatcttcaaggtcacgaatcttgctggtggcatgacgcgccaacgccagcggcaggtcgtcggaggagataccactgccgtcgtcgcgcacccgcagcagcttgacgccgccctgctccacgtccacatcaatgcgcttggcgccggagtcgatgctgttttccagcagctccttgatcaccgatgccgggcgctcaaccacctcacccgcggcaatctggttggccaggcgcgggctgagcagttcgatgcgcgagccgctgttcaagactgattcgctcattactgcgccgccaattcagtgccagggatggtcaatacctggccgactttcagttcatcggttttcagattattcgcgctgcgcagtgttgctggcgacacctggaaacgcacggccagcatcgccagcgtgtcgccgggctgcacgcgatggtcgcgcgggccctgggcgattttcccggaatcacgcagccaggcgatataagtgcccggcggcgggttctgctggaagaactggcggataccggcgctgatcgaacgggccagtgcctgctggtggctggagctggccagcttcgaggcttcgttggagttggagataaacccggtttccaccaggatcgacgggatgtccggcgacttcaacaccatgaacccggcctgttccacgcgttgtttatgcaacgacgtcacacgaccaatgttgctcaacactttctggccaacgttcaggctggacgtcaacgaggccgtcatcgacaggtcgagcagtacgcccgcgagcattttgtccttgtcatcgagggacacgttgccggccccgccgatcaagtcggagcggttttcactgtccgccagccaacgcgccgtctcggacgtggcgccgcgatccgacagcgcaaacaccgacgcaccaaacgcggcggtcgacggtgcggcgtcggcgtggatcgacacaaacaggtcggcgcctttcttgcgcgctatttcagtacggccacgcaacgggatgaaatagtcgccggtacgcgtcagttcggcacgatagcctttcatggcgttgacctggcgttgcaattcacgggcgatggccagaaccacgtctttctcatgctggccgcgagagccggaggcgcctgggtcttcgccgccgtggccggcgtcgatcaccacgataatgtcgcgtttgcccgccggaggcggcggcggaggcggcaacttgacctgcggttgcgacgggttgaccggcaccgctggcacggtcgctacgcttggcggcggtgccggcggcgggttggcatcggcggcgttgtcaaacaggtcgactaccagccggttgccgtattgggcgttcggcgccagcacaaagcttttcggggtcacggcctttttcaggtcgatcaccacgcgcaaatcggtcggtgtgcgttgggccgagcgcatggcggtaatcggggtgttggcggtggacactttcaacggcgcggccagggtcgcaccgttgatatcgatcaccaggcgatcaggcgacgacagggtaaaaacgctgtgctggaccgggccagacaggtcaaacaccagccgcgtgttatccggcgctcgccacaggcgaacacttttcacctgtgaagcagccagagcattgacagtcattgccgcaagcaacacccctacgacagcaaccaacgcgcgaaagcgcatacctaaccccaccaattatttgaattccagtgccaaagcggcgcaccacgactgaccgcgcgcgctctggggcaacaacttcagctgacgtcctgtttcatgcggcgtaatggtaatggtcaggtccggctttggcaaaaagcctgtgcctttatctggccactcgatcaggcacaacgcgtcttcgtcgaagtaatcgcggatgcccatgtactccagctcttcgggatcgaccagccgatagaggtcgaagtggaaagcgcgtatcgcaccgatctcgtagggttcaaccagtgtgaacgtggggcttttgactgccccggtgtggcccagaccgcgaatgatcccgcgtgacagtgtggtcttgcccgccccaaggtcgccctcgagaaaaatcagcccggcaccggccgtgacctgggagatgcgatgaccgaacgcgaccatcgcgtcttcatcggccaggaaaagagttacttcaggcacggcgactgctcctccagcaattgtcgaatggcgggtatcaggtcactggcaaccaaaccgcgaccaaaactgccctggcgatcccctgccgtggcgtgcaaccacacggccaggcagcttgcttcatagccaggcaagccctgcgccagcaatgcgccgaccaggccggccaatacatcgccaagcccggccgtggccatcgccggatggccttggtcacatcgcgaaacacgcccgtccgggctggcaatcaaactgccagcacccttgaggatagccactgcattgaatctctgacttaaaacgcgcgccaccttaaggcgatcggcctgaacctcggctgtcgtgatacccagcaagcgcgcagcttcacccggatggggtgtgatcaccgaatgggccggcaggttcaggccacctgcggccaactgattcaacgcgtcagcatcccagacctgcggctgcgtggcgttggcggcaaccgacagcaggcttttgccccaagcggcatgacccaggcctgggccgatgacgatcaccgaaatcttttccagcagccccatcagttggttggctgaactcacgccaaccgtcatgacctcaggcaggcgcgccagggcggcaggcacatggtcggggcgggtcgccagcgacaccatgcccgcgccactgcgcaaggcgctttcggcgctcagcaacgctgcgccgccaaagccgcggtcgccgccgatgaccagcaggtggccgaactggcctttatgggcgtccggggaacgcgcagccagttgcggcaaatggccgggcaacaggggctgaacgtcggtaattgggtgttttgtctgcggcatgcgtcttcaagctccgatgtctggcagaattatacgcatctaacctgtggtttcccgtgtctcatgcctgctattacctccgatctgcccgccctcgcccaatcgatcaaagactggggccgcgagctgggctttcaacaagtcggcatcagcggcctggacctggccgagcatgaacagcacctgcaacgctggctcgacgcgggctaccacggcgagatggagtacatggccgcccacggcagcaaacgctcgcaccccgacgaactggtgccgggcaccttgcgcgtggtctcgctgcgcatggattatctgccaggcgacacgcaaatggcgcagttgctggcaaagccggaaaaagcctacatctcgcgctacgccctgggccgcgactaccacaagctgatccgcaaacgcgtgcagcaactggctgatcgcatccaggcgcagatcggcccgttcggctttcgcgcatttgtcgacagcgcacccgtgctggaaaaagccatcgccgaacaagccgggctgggctggatcggcaaaaacaccctggtgctcaaccgcaaggccggcagttatttcttcctgagcgagctgtttgtcgatttgccgctccccgttgacgcgcctcacagcactgaacactgcggccgctgcaccgcctgcctggacatttgcccgaccaacgccttcgtcgggccctacgtgctcgacgcccggcgctgcatttcctacctgaccatcgaactcaaaagcgctatcccggaagacttgcgccccttgatcggcaaccgcgtattcggctgcgatgactgtcagatcgtttgcccgtggaatcgtttcgcccgcgccaccggtgaaagcgatttcaagccacgacataatctggataacgccgagttggccgagttatttatgtgggatgaggataaattcctcagcagcaccgagggttcgccgctgcgccgcgccggctatgagcgctggttgcgcaacctggcggtaggcctgggcaatgcaccgtcgagcattccggtgctcgaagcgttgaaggcacgcagggattacccgtctgagctggtgcgcgaacacgtcgagtgggcgctgaaccagcacgcctcgcgttaatgcacgtcgtcgttgtagacgaacttgggcatttcccagtgaaaacggatcgccaacaggcgtaatagaaagccgctgaacagggtcagcagaatcgcctgctcgctgggcagttccaggtacaggcagagcatgtagaaccaggcagcgaggaacgacacgctggcgtacagctcgcggcggaagatcagcgggatgtcgttgcagaaaatgtcgcgcaggatgccaccgaacacgcccgtgatcacgccactgaccgaggccaccagcatgccgtggcccatttccagggcggtcatgcagccgatcagagtgaaggccaccaagcccaaggcgtccagcgccagaaacagcgagcgcaggcggcgcatcaacggcgcgatgaaaatcgtcaccagcgccgcgatggaggtcagcaccaggtattccgggtgtttgacccatgtcagcgggtaatgccccaacagcacgtcacgcactgagccgccgcccaaggcggtgacgcaggcgatcagcaccacgccaaaccagtccatgccacggcgaccggcggacaaggcgccagtcatggcttcggcggtgatggcgatgaggtagagcatcaacagcatgagggcgatccttgcgattaggccggcagtctaatcatttggtagtggcaccaaaagggggcatctggcgaaagaccgcgtcggccctatcgcaggcaagccagctcccacactttgatttgtgaatgcgatcaactgtgggagctggcttgcctgcgatgaggccaaggcaggcaccgcaaattcaagccttgatgaaatgcttgcggtaatgctgcaactcggcaatcgactcacgaatatcatccagcgccaaatgcgtactgcctttatggaagctgtctttgacttccggcgcccagcgcgcggccagctctttaagcgtggacacatccaggttgcggtagtggaagtagctttccagccctttcatatgggtataaaggaagcgacggtcctggcagatgctgttgccgcagatcggcgacttgcccttgggcacccacttttccaggaaggcgatggtttcggcctcggcttcagccatgctgatgcggctgtcgcgcacgcgctgggtcaggccggagttgccgtgggtgcgggtgttccactcgtccatggtggcgaggacggcgtcggagtggtggatggcgatcaccggaccttcggccaaggtgttgaggttgctgtcggtgacaatagtcgccatctcgatgatgacgtcggtgtcggggttcagaccggtcatttccagatcgatccaaatcaggttctgtgggttttgcatggctctattctcttggcaccttggcttagctgcgcagtttagcaggcaggggcgtgctagactcgcgaccgttttacccaacctttgcattatcgacacggaacaccaatggccaaacgccagctcaatcgtcgccaaaactggcgcatcgaaaagattcaaggtgaacgcgccgctcgcgccgccaaacgtgaatcctccgccgtggaagcgcttgagggcggcgacctgggccccgagcaaacgggcctggtgatcgcgcactttggtgtgcaggtcgaagtcgaggcgctggaaggcgaactcgcgggccaggtgttccgctgccacctgcgcgcaaacctgcctgcgctggtgaccggtgatcaggtggtatggcgcgccggcaaccagggcatcggcgtgatcgtcgcccagttgccgcgcaccaccgagctgcgccgccccgacagccgtggccagctcaagccggtggccgccaacgtcgacatgatcgtgatcgtgttcgcaccactgcccgaaccccatgccaacctgatcgaccgctacctcgtagccgccgaacatgccggcatccgcccgctgttgctgctgaacaaattcgacctcatcgacgatcagaacgccccggcgctcaacgcgttgctggcggtttaccgcaccctgggctatccggtgctggaagtctcggcgcatcacggcaatggcatggaacaactgcaacagcagttggacgggcgcatcagcgtgtttgtcggccagtccggcgtaggtaaatcctcgctggtcaatagcctgctgccggaagtcgaaacccgcgtgggcccgctgtcggaactgtccgggcagggcacccacaccaccaccaccgcgcggttgttccacttcccgggcggcggcgagttgatcgactccccgggcatccgcgagttcggcctcggccacgtcagccgcagcgacgtggaagcgggcttcatcgagttcaacgacctgatcggcacctgccgcttccgcgactgcaaacacgaccgcgagccgggctgtgcattgctcaaggcgctggaagatggccgcgtacagcaacagcggatgaacagctatcggtcgattattgcgagcttgccggagagtagttactaatccttgtggcgagctcacgcacatgcacaaaggccgcgatgatcgcggcctttgtgcatgtgcggcttaagaaccaggcgctggcgccgtaggatctttcaccccaccatcatcaaacaggttcagcttctgccgcagttcatgggccggcaacggctcctgccctggcggaagagcgttcgggtccgccggcacttcacccggcgcaccttcgcccggcgtcggaaccggcatggcaccttggtccccttcaatcgcacgctgggcctttttggtcagcaccacgatatcgatacgacggttgatcgggttgaacgggtctttcggatcaaacagctgcgaggacgcaaaccccaccacgcgcgccacttgcgggtctggatagctgcctgcgactaacgcacggcgggcggcgttggcacggttggcggacagctcccagttaccgaagtcaccctggcccgcataaggcttggcgtcagtatggccactgatgctgatcttgttcggcaccgccttgatggtgtcggccatggccaacaggatgtcttcaaaatacggcttcaggcgcgcactgccggaatcgaacatcggccggttggcggcgtcggtgatctggatgcgcagcccttcgggcgtgatttcgaaggaaatctgatccttgaatttcagcagttgcgggttttcttcgaccttggtctgcaactcctgcaacagcaactccaggcgctccttctcgacctgctcggccatgctttcgactttttcgcgctcgatcggaatgttttcctgcggcgattccgtcttgatctccgggttgatggtgcgctcaggcgccaactgcggcgagccgcccaagtcgatcacaaacggcgtgccgctttccgaaaaaccaatggggtctttgaagtagccggcgattgcgatcttctgttccggcgtggcggtggacatcagccacagcaccaggaagaacgccatcatcgccgtcgcaaagtcggcgaaagcgattttccaggcgccgccatggtgccccgcagcgaagcgcttgacgcgcttgatgattatcggctggttgttttccatgacttagcgaccgcgaaccgcttgttccagctcggcaaaactcgggcggtgtttcgggtacagcaccttgcgcccgaactccaccgccagcgagggcggcatgccggacgccgaagccaccaggcacgccttgatcgcctcgtacagattgatttcttccttggcatcgtgggccagggaggtggcgagcgggccgaagaaaccataggccgcgagaataccgaagaaggtacccacgagggccgcacccacgtgcatgccgatggccttctggtcgccttcgcccagggacgccatggtcaccacgataccgagtaccgccgcgacgataccgaaaccgggcatgccatcggcgataccggtgaccgcgtgagacgggtgttccagctcttctttcaggctgaacagctccatgtcgaacaggccttccagctcgtggggggccatgttgccggaggacatgatgcgcaggtaatcacagatatacgcggtcatgcgctcatctttgagcacggccgggtacttggcgaaaatcgggctggcggcggcgtcttcgatgtcgccttcgatggccatcatgccttcgcggcggctcttgttgaggatctcgtaaataagccccagcacttccagatagaaggtgtgggaaaagcgcgagctgaacatgcccagcgacttcttgatcacgtgcatggtcatgtagccggggttggcctgcaagaacgcaccaaacgcggcaccgccaataatcagcacttcgaaaggctggatcagcgcggcaattttaccgtgggaaaggacatacccacccagcacgcttgcgatgacgacgatgatgccgataattttagccataggggatttgtacttgcgccgtcgggttcatggacatattgggtgtagctgaaaaactcttgttctacttatcggcaaaactgcgccagactatagcccgttaaggcgaaaagccaattcggcccgttccgggcgtgttgaacgcaagtgatgatcgcgccccaatcatggctaatgaaacgacagtcccaactgcaaaacccaccaccctcgccgcctggatcaagcgcctggatgacgtgatgttgcccgtcccccaagccagccatgagcgcgtgtgcaaagccatccgcgacagccgcagttcattgcgcgatatcgctgagctgatgcaaaacagcccggcgctggtgctcgcggtgatgcgcgaggccaacagccacacccatggcagcatggcggaaccggcagaaaacctcgaagttgcgctgaaccgcctgggcctcaaacgcgcggaggagttgctggttcgcctgccctcggtgccggaaaaagacattcccgtggccctgcgccaactgctgctgatcagccagcacgcctcccaacaagccaacggtttgttcgccagccggctggcgcggttgtggcaggacattcactggggcagcctgctgtttctgtcgccgctgtggccgatggccgtggcctatcccaagctgctggaagaatgggaactgcgagtgattcataagggccagtcggcgcatcaggttgagcaggaactgttcggcgtgcgcctgctggacctttgcctgggcctgacggatgcctggcacttgccgatctgggtttcccagggctacaccttgctgctcacggagcaacgtctgctggtcaaagcattgcacattgcacgtgaagatgacgccttgcgccaccagcaactgctggacgcagaacccaatctgcgccgctggctgaaccagccggccaacaccgtgctgctggccaacggcctggcgatgtcggcgcaagagtcctggacctgcccgcacaccgagcgctggcaatacctcaccgcgctgtacctgcaagcgccactgggcgacgtgcagcagcaggttcaccagcaagccgtcatcagcgcccgcaccaccttgatgcccgacctgtggcacccggcgctgtcattgatctggccgtggcatgtgcaaaaggtccaccgcggcctgctgccggcaccaccgcccaccgcagaatcactggctatctggcgtaaacgctgcaccgagctgttggtcgatccgagccgctttgccaacgccatgcacctgacgacctgcgcaaaagaagccttggtggccagtggcatgcaacgcgtgttgctgctaatggcagaccgcgcattaagcacactgcgcgtgcatcaggccgacggtttgcccaaggaagccgctaacctgagcctggatgtggtcaacagcacattgctgcaacgcctgctggagaagtccgcccaggtgcgcctgacacctgacaaccacgcgcagttcttcacgttgctgcctccgaccttgcgccgcctgttcaccggcgagcacctgctgttgcgttcactgagctgcaacggccgtgtggtgatgctgatggtcgcggatcaaggcggcgggccgttctcggaaacgacagtgcaagcctttggtaaaaccgcccaatgcatcgaaaaggccctgcatagctttaccaaccgcagcgcctgatgcttgcgctacaatcgccctcttttatcgccaacatttgtgcccaggagacctcacatgcctgacttctctggcttgccgctggtgatcgaatccagcgacctgcaaggtcgccttgatgccgaacacctgattctggtggacctcaccagcgccgcccgctacgccgaagggcatatccccggcgcgcatttcgttgaccccaagcgcacccaactgggccagccgccggcacccggtttgctgcccaacaaagccgacctggaaaaactcttcggcgaactgggccacaccccggacgccacttacgtggtctatgacgacgaaggcggcggctgggccgggcgttttatctggatgctcgacgtgatcggccaccagaaataccactacctcgacggcggcctgctggcgtggctcgaaggccggcacccgctgtcaaccgacgtgcccgccccggtcggcggcccggtcagcctgaccttgcacgacggcccgaccgctacccgcgaatacctgcaaagccgtctcggcgccgccgacctgggcatctgggacgcacgcggcccgctggaatactccggcgagaaagtcctcgcagccaagggtggccacattcccggcgcggtgaacttcgaatggaccgccggcatggacaaggcgcgcaacctgcgcatccgccgtgacatgccgcagatcctcgaagacctcgggctgaccaaaggcaaagaaatcatcactcactgccagactcaccaccgctctggcttcacctacctggtggccaaggcgctcggttatccgcgagtcaaaggttatgccggttcctggggcgaatggggcaaccaccccgacacccccgttgagatttaaggtttaaggacagttatgaaaaagcagttgtttatcctcagccagtatttgctgccgcaccacttgctgtcgcgcctggccggttgcatcgccgaatgccgcgtgcgctggttcaagaatgcgttcacccgctggttcgccaagcgctatcaagtggacatgtcccaggccctggttgaagacgttaccgcctacgagcacttcaacgccttcttcacccgagccctgaaagacggcgcgcgcccgctggatcaaaccccgggcgcggtcctttgccctgccgacggcgcgatcagccagcttggcccgatcgagcatggccgtgtgttccaggccaaaggccacagtttcagcgtgctggaattgctcggtggcgatgccgcgctgtccgcgccgttcatgggcggtgatttcgccactgtttacctgtcaccgaaggactaccaccgcgtgcacatgccgctggccggcacgctgcgtgagatggtctacatcccgggtcgcatcttctcggtgaaccagactaccgctgaaaatgtacctgagctgttcgcgcgcaacgaacgcgtcgcctgcattttcgacaccgaacgcggcccaatggctgtggtgttggtgggtgcaatgattgtggcctcgattgaaaccgtgtgggccgggctggtgacgccgccgaagcgcgagctgaaaactttccgctacgacgaagcggcgcgtgcgccgattcatctggaaaaaggtgcggaactgggtcgcttcaagctgggttcgactgcgattgtgttgttcgggccggatcaggtgaagtgggctgaggagctggcggccggtacgccggtgcagatgggccagggcatggcactgccaaaagcctgatacacaccagatttaaagctggaacccaatcaatgtgggagctggcttgcctgcgatagcggtgttggattcaccatcgctatcgcaggcaagccagctcccacatttttttccgcgtctgttcagtgattagagctgaccatcgcggtcgcgaaagcccagcagatacagcacgccatccagccccaaggtcgaaatcgcctgcttcgccgactgcttcaccagcggcttggcacggaacgccacacccagcccggcgatcgccagcatcggcaagtcattcgccccgtcgccgaccgcaatggtctgctccagacgcaaaccttccttgtgggccaattccttcagcagatccgctttgcgctgtgcgtcgacaatcggctctacggccacacccgtcaccttgccatccaccacttccagctcattggcgaacacatagtcgatgcccagtttcgcctgcaattgcttggcaaagtaagtgaagccgcccgacaggatcgccgtcttgtagcccaggcgcttgagttcggcgaacagggtttcggcgccttcggtcaggcgcaacgaggcgccaatggagtccagcacgctgacgtccaagcctttgagcagcgccaggcgctccttgaagctggcacggaaatccagctcaccggccatggcacgctcggtgatttcagacacttgctcacctacgccggcagccttggccagttcgtcaatgacttcggcttcgatcagcgtcgagtccatgtcgaataccgccaggcggcgattgcggcggaacagggaatcttcctgaaaggcgatatcgacattcagctcctgagccacgctgaggaattcggcgcgcagggcttgtggatcagccggctcaccgcgtacggagaactcgatgcagcccttgcctttgtcggccggcgtgtccaacggcatgcgacccgacagacggtcgatgtggtcgatattcaaaccgtattgcgcagtgatcgagctgacgcgttgcaattgttcggcggtgaccttgcgggtaagcagcgtcacgatgtggcgttttttgccctggccagccacccagtgctggtagtcctcttcggacaccggggtgaaacgcacttgttgatccagcttgtacgccgtaaacaggatgtccttgaggactgaagacgcctgttcggtactcgggatttccaccaggatgccaaacgacaaggtgtcgtggatcaccgcctggccgatgtcgagaatgttcacaccaccctgggccagaacgccggtaatggcggcagtgagacccgggcggtcttcgccagtgatgtttatcaggacaatttcgcgcaaggcgcacccccaggctggaaaaaaaccgcattctacccactttcagtgaccatcgggcacagccagcgctttgccggtcctagggctgtcgctatactgcgcgtcaacttcacggaccaagagccgagcgcaagtgaaccggcccacgccagtaaaaaccgataacttcttcctgctgatcttccgggcactgcgccatcgccgtgtaccgatcgcattacgcatcgccagccataacgtgatcctggtcgctctggccctggtgatctacgcctgcgtgatgggtttgcagttcaagcaggccatgcatgagcaagccgatgcgctgggcgccagcctgacgacgcagacggccacgtcggcgaccgagctgttggtgtccaacgacatcctcagcctcaacgtgctgctcaacaacctgaccaagaacccgctggtggcccacgccgccatctacagtgtggacaaccggatcatggccgaagccgggcagcgcccgaaaaacggcctgctgggtgaggctgaaggcctgtattccagcaacatcacgttccaggacgtgaaggccggccagttgcgcatcagcctcgacatgcagcaattccagcagccgatgaccatcagcctgcagagcatgggcatcctgagtgcgatcctgttggcattggccctggccttgagcttgcgtttggggcggcatatctccacgccattgatgcaattgcgcatctggctgcgcgatatcgacgaacacaccccggccaccgaccgtcaggatgagatcggcgacctcgcgcgccaactgcacgccagtttcgccccggagccggtgattcctgaggctccacccgagcccgagtacgatgacgccgactacaacgacgaacccgagtttgaggtgcgcgacctgcgcgaaccgggctttgacgaagaggcgccagcggcacctgccaagccggcgccacgccaggtgatcagggctgaagaggacgaactggacgacgaagacccgttcgccgacctgcgcgacaccgcttctgccgcccctgccgccgcacccaaaccggcaccggcgcccgtgaagaacaccgagccccagcacagcgccgtactggccgtgcaactgggagcccaggaccaactgcgccgcctgccccgcgcgcgcttgacggaattgctcgaacgctaccgtgactgtctcgaccaggctgcctcgctgtatcagagcgaactgcacaccctgaacgacggcagcacgttgatgctgttccacagcgaagacagcggtgaagactacctgaccaacgcgatctgctgcggcgagttgctgcgcgccctgggccatgccttgcagatcgaagtggcagacagcggcatcactttgcaactgcaactgggcctgaccgtgggcgacgacctgtttggcatcagccagatcgacttgctactgaccgaaaacgcccaggacgcgctggccttgtcgcaacacagccgcaacttgctgctggtggagcgcaagatcagtgaggacacgctgatccgtcagcgcgcacgtatccgcccgatcgccagcccagagggcgcgagctgcgtagagcggttgatggagccttatccgtcgatgctggaacgccagctggcgcggatgcatgagacccgtaccaagacatagacccatgtgggagcgggcttgcccgcgatagcggaacatcagtcgacatatcattggctgaaccaccgccatcgcgggcaagcccgctcccacaaggtgtgtgtggcatggctcaaatcgcagacaacaaaaaggcccgctgagtaagcgggccttttgtttatgcgcgattcagatcagaacctgaacacttccatatccgtacgaatcggtgttgccatcggcatcttgggcttctccggcgctgccggcttggcctgggccggcgcttgcttgcgcggtgcctcggcgaccggcggctggttggccaatggcttgagggccactgacaactgctgcgccaaatgctgcagcaacacgccctgggcctggacctgggacgcggtggtgccggtgtgttcttcctgcaggtgcacgatgcggttatcccgcacctggccacggcggtcgatcaagcgccactgcgcgtcgaggatcgccggctgcgaggcacccgagtcgagccgggtaatggtcagcaacacctgcacatccggagtaaaacccgttggcgcaggcgcgagcaccacacgctggctgtccaactggccggcgacctgacgcaacatcagctggttgatatcggacgacaaactgcccgcccaacgaccatcggtggaaccttgcaggctgccgtcgttctgacgttgcagcagggtttcgcgttgcaggtagtcagcaacgacgaccgggcccagcaatacagccatgccagccgtttgggctggctgagccggacttccgctgtccagctggtacagcgacaccggctggtgtgtgctgcaacccgccaaccccaaaaggccagcgagcatcaaaaataaaggaaggcgtggagcagtcatcatcccatccaggtggctgccacaaggcgaaccacaatgtaatactaaaaataacctgaacgcgctcggccacgccggcgctggaaaggccatatcatccgtgaatatgcgccgtgactccagcgtcatagtgccgatctacgcgttaaatcgtagatcgggggctctaaagcgccttaaacgggtgtttccaccaacaatgcatccacacgctggaagccgcgcggcagtttattaccgcgtcggccgcgctcacccttgtagtgctcaaggtcgtcagggcgcagcgacagcgtgcgcttgccggcttgaagcaccagggtagagccttccgggatcaccgcgatgtcggtcacgtactcttcgcgactggccacccgctcccctggaataccaatgatcttgttgcctttgcctttacccagctgtggcagatcgctgattttgaacaccagcaagcgcccttcagtggtcaccgacgccagccagttgctctcgcggtcttccaccgtgcgcggcaaaatcaccttggcgttgttgggcaggctcaacaatgccttgcccgccttgttcttggcctgcaggtcttcacccttgaccacgaacccgtaacccgcgtcggaagcgatgacgtacagcgaatcatcgtccggcagcagcacgcattcgaaattcgcccccggtggcggcgtcaggcggccggtgagcggctcgccctggccccgtgccgacggcaaggtgtgggccggtaccgagtaactgcgcccggtggagtcgataaacactgcaaactggttggaacgcccggcggcagcggtcttgaaaccgtcgccagccttgtacgacaggccggttgcgtcgatatcatgccctttggcagaacgaacccaacccttttccgacagaacgacggtaattttctcgtttggcagcagctcggtttctgtcagcgctttcgcttcagcacgctcgacgattggcgaccgacggtcatcaccataggtttcggcatctttgatcagttcgctgcgcaccagcttcttgagcttggcttcgctgcccagcagggcctgcagcttggcttgttccttaagcagcgcgtcctgctcgtcgcgcagcttcatttcttccaatcgcgccagctggcgcaaacgggtgtcgaggatgtagtccgcctggatttcgctcagttcgaaccgcgcgatcagctcggctttcgggtgctcggcggtgcggatgatgtggatcacttcatccaggttgaggtaggcaatcagcaaaccgtccaacaggtgcaggcgacgctcgaccttgtccaggcggaattgcaggcggcgacgcaccgtgtttacccggaactccagccactccaccagcaagttgcgcaggttcttcagctgcggcttgccgtccaggccgatgatgttgacgttgacccggtagctggactccaagtcggtgctggcaaacagatgctgcatcagcacttcgtgatcgacccggctgttggtcgggatgatcacgatgcggcatgggttttcatggtcggattcgtcacgcaggtctgcgacctgcggcaatttcgacggttttgcctgcatcaacgcggcgatctgctccagcaccttggcgccggacacctggtgcggcagcgcggtgacaataatgtcgccgtcttcaatgtggtacacggcgcgcatgcgcaccgagcccttgccggtttcgtacattttcagcaggtcggcgcgcggcgtgatgatttccgcttcggtcgggtaatccgggccctggatgtgctcgcagagctgctcgaccgtggctttgggctcatcaagcaaacgcacgcaggccgtggcgacctcacgcaagttatgcggcggcacgtcggtggccatacccacggcaatgccggtggtgccattgagcaagatattcggcaaacgtgccggcaacaccagaggttcgtcgagggtaccgtcgaagttagggccccaatcggcggtgccctgccccagctcgctgagcagcacttcggagtaacgcgacagccgcgcttcggtgtaacgcatggcggcgaaggacttgggatcatccggcgcaccccagttaccctggccgtccaccagcgtgtagcggtagctgaacggctgagccatcagcaccatggcttcgtagcacgccgagtcgccgtgggggtggaacttgccgagcacgtcaccgacggtacgcgcggacttcttgtgcttggaatcagcgtccaggcccaactcactcatggcgtagatgatgcgccgctgcacgggcttcaggccgtcgccgatatgcggcagagcacggtccatgatcacgtacatggagtagttgaggtaggcattttcggtgaagtcagccagcgaccggcgttctacgccgtctaagctgtctgcgaggatgtcactcatgcgggcctcatcattgtttggtctggcgcagcagcaaagtgccgctgcgctgggtaaattcaagttgtttcagtgcactcatgcccagcaatacctgatcgccgtccaaccccggtgccaccagggcacgtacgtcctgcaggacgatttcgccgagttgcaggcggtcgaggtgggtacgaaacccctggctcaagccattggcggtactcaaggtcaccggcatgccgcgcttaagccccaggcgatcggccaacccggccggaaccgccacatcggtagccccggtatcaagcataaaagccaccggctggccgttgatctggccgctggcgacaaaatgcccctggttattgccgagcagttttacttcgatgtaaccctcgtgtttctctgaggtcaccacggcattggggttctcctgacgcgcttcccattgcccaaaaaagtgtgtcgccaaaaacagcccggcgccccaagccacaaacatcaatacacggccggcacgcttgccgggcggctgagcgctcaaggcttggcgctccatccacccgcaggagcggcgaaacgatagaccaccgggcgtttttccccatcggcgcgcgggccgaagttgttgtcgatacccagccaggcgccttcggcatccaccaccagggcttcggccaggccgtaaggctgggcatagcgccggttcggcgccagggtctcgtcggcaaacgaccagcacagctcgactttggcggtgaccgcatcgcgccggcaaatctggaacgcattgcgctccagggtaaacagcttgccgttgaacagcgccaggtcggcaaaatccttggacaccgctttcgcgttggtaaactgcgccggctgcacttcctggccagcctcgctcagcaatacacagggcccgtcgcagtcccacacactttgcgcacgcttgatggagattaatccacgccgctcgcgctcggccgccagccaaatctgattgccgtccgggtttatcgccaggccttcgaacaacgcattgaaatgcagcaacatgccactggcgcgagcttcacgcaccatgcccggggcgattttcagccactgcggcgcgccgctcaccggcacttgcagcaccgccgcatgggcttcactgacaatgtagcggttacccgcgccatcgcaggtgatgccttcaaaatccaggtcgccaccgcgaatgaacgaagcggccttggtgcgcgaacgcaacccccacggcaaccccgattcaggcacgggcggcacgtcgattttcactgtttcggcctgccaggtcggcgcgctgatatccagacgataaatctgatcgtcatcacgatcagacacggtccacaaatccttgccgcacaacgccaggcccgacaggttaccgccacgcatgccgtccaccgggtgttcggatacgagtttgagctcagccacaggtgcggcaaccactggagtggccgccaacccgcttgatatcaggatcgccagggcgaaacctgtacgcatcagcccagaacctcggcgaggttgcctttggattccagccaggacttgcggtccggcgcgcgcttcttcgccagcagcatgtccatcatttccgacgtggcggcgtagtcttcgagcgtcaactgcaccaggcgccgggtgttcgggtccatggtggtttcgcgcagctgcggcgggttcatttcacccaggcctttgaatcgcgtgacctgtggcttgccgcgtttcttctcggccaccagacggtcaaggatgccatcgcgctcggcttcgtcgagggcgtagaaaatctctttgcccaggtcaatgcggtacagcggcggcatggcgacgtagacgtggccggcatccaccaatgggcggaagtgctgcacaaacagcgcgcagagcaaggttgcaatgtgcaggccgtcggagtcggcgtcggcaaggatgcagatcttgccgtagcgcagctggctcatgtccgccgcgcccgggtcgaccccgatggccacggcgatgttgtgcacctcctggctggccaggacttcgctgccatcgacttcccaggtgttgaggatcttgccgcgcaacggcaggatcgcctggaactctttgtcccgcgcttgcttggcggaaccgccggcggaatcaccttccaccaggaacagctcggaacgcatcgggtcctgcccggcgcagtcggccagcttgcccgggagtgccgggccctgggtgatgcgtttgcgttcgactttcttgctcgccttcaggcgacggccagcattgttgatcgccagctccgccagggccaggcccagttcagggtgctcgttgagccacaggctgaacgcatccttgaccacaccggagacaaatgccgctgcttcacgggatgacaggcgctctttggtttggccagagaattgcggctcctgcattttcatcgacagcacgaacgcaatgcgctcccacacgtcttccggcgccagcttcacaccgcgcggcagcaggctgcggtattcgcagaattcgcgcatggcatccagcaaaccctggcgcaaaccgttgacgtgggtaccgccctgggccgtcgggatcaggttgacgtagctttcctgcacgctgtcgccgccttccggcaaccacagcagcgcccagtcgacggcttctttgttaccggccaggctgccgcagaacggctcgttcggcagacgttcgaagtcgctgacggaatcttccaggtaggaacgcagaccgtcttcgtaatgccattcgactttttcgccggtgcctttgtcttcaaaactgaccagcaggcccgggcacagcacagccttagccttaagtacgtgcttgaggcggctgatggagaatttgggcgaatcgaagtatttcgggtccggcgcaaagtacacgctggtgcccgtgttgcgcttgccaacggtgccgatgacttgcaagtcggtggccttgtagccatcggcgaacgtcatttcgtactcgttgccgtcgcgcttgaccttgacccgcacgtggttcgacaaggcgttgaccacggaaatacccacaccgtgcaagccaccggagaactggtagttcttgttggagaacttgccccccgcgtggagcttggtgaggatcagctcgacacctgacacaccctcttccgggtggatgtccaccggcatgccgcgaccatcgtcggacacttccagagaatggtcggcgtgaaggatgacctgtaccgacttggcgtggccggccaaggcttcgtcgacactgttgtcgatgacttcctgggcaaggtggttcggccggctggtgtcggtatacatgccggggcgtttgcgcaccgggtcgaggcccgagaggacttcgatggcgtcggcgttataagagctagcgctgggagtggccatggggtctcgtcgtgagtcgttcgattaaaaagtgacctgcgattcttacaatgaagaaaaatcgaaggattgatactgatctgcgccaataccggcaaagctcaacatcgccggcaattgttgggcgaacccctgataaccatggtcgccgccggcctggatgcgcaaggcgcaggcccggtaatactgctgggcaaggcgataatccagcgtttcatcgccggtctgcaaccacacctggtaacgcgcggcgtcctggggcgccgcaacttccagctcggccagggccgcgacgtggtcgtgggtcagttcccaggcttcatcggtgtagtggttcttctgggtgcccaggtagccgtcgaacatccgatgggggctgaccgcggggttcaccagcagcgccttgaggccatggcgttcagcaagatgggttgcatagtagccgccgagtgagctgccgaccagcagcggccgccccagttgcgcgatagcctcttccaattgaggaattgcctgacgcggatggtgatgcagggccggcacacgcagcctgtcggccaggccgaggctgtccattacggtgatcaactggctggccttgttggacacaggcgcgctgttgaaaccgtggatatacaagatcgaagcggacatgccgggctctccatgcttgtgccaaagaggcgcagtttacagggatcgggagcctgtgtgatgacctcaatccaaaggacacggaagaaccctgtgggagctggcttgcctgcgatagcggtctgcctgccaataaacagggggctgatacaccgctatcgcaggcaagccagctcccacatttaatagccgttgctgccgtaatcgatagtgaaggtgaagcccttgacccgctccacaccggtctccaaccgtccgtcggcatgcaaacgaagccaccgatacccaggcgcctgctcgctgaccttgaagtcttcactacccggtgcgaactggatgcaggtggacggtgaggccagcaaccgcacgccattgcgctcgcggtcgatttcttgatgcacatgcccccacagcaccgccttgacctggggaaacctatccagcacggcaaacagcgcctcagggttgcgcaggccgatcggctccatccacgcacaaccaatcggcaccgggtgatggtggaaacacaccagatggtgacggttcggcgcttcactcagggcctgggcaagcagttgcagttgctgatcctgcagatagccgggcacggagccgggcaccgcagagtccagcagggtgacacgccagttaccgatatcgaccaccggctccagcaaatcgctgtgcacggcagcgtgggccatgatctgcggttcatcgtggttgccgggaatccagcgcgcaggagcgctgatgacctgagtcatatcgcgaaactgttgataagactccagcgtgccgtcctgggacaggtcccctgtagccagtaccagatcgatctgcggctgttgctcgcgcaccagctcgatcacccgttgcaggctttcgtgggtgttcatgcccagcagcgtaccgtcggcctcggcaaacaagtggctgtcggacaactgcaccagcaacgccggcgcatcagggttcacggtggatacgctcggcaaggcgctctcccaaggcaatcacaggaatagtcattggcgcgattatgctggggcaggacacaagaggaaaccagaggaagcagatgcagttcacatctaccgcacaacttcgaactcgtggcccagggccaggcaatggctcaaccactcaccgaggaacacattgagctgtgctttctcatcgggctggtgcatgaagacgttcgggtaaggatagatgctgcgaaagcgccgcgcatgttcggcgctgatcacttcggccattcgcgcgtcgtgatacacctgcacttccagctgcggcaccggcagccagggcaggctgtgctcctggcgtacgcgcagggtggtggtgtacgggcaattgacgatcacctcaagcgtcagcacaccgagcatctggtcgccatgggtcacggcaatgcgccgcgcctcgggggtgtggcgcatgtcggggagcaagcgcatcagccgcgcatagttggcctcgcaggcggcttgcagcccgatcaggtcgactcgataacgttcccgtgcctttactgccataaccccctcacttccgcgcgattaagcgcaagccattgcagggcgataatgctggctgcgttggaaattttgccgtcacgcaccgcttgcagggcgtcttcaaacgcccacggggtgacgcggatatcttctgcctcttcttccagtccatggacgccaccggcacccgagctgtcgcaacggcccaggtacaagtgaacaaattcggtactgccgccgggcgaaggaaaatatttggtaatgggccacagcgcggagaacgtcagcccagcttcctcctcggcttcacggtgtgcaacctcctccggttcttcatccttgtcgatcaggccggcaaccatctccaccagccacgggttgtcggtgcggcccatggcgcctacgcggaactgctcgatgagcaccacctcgtcacgttgcgggtcgtagggcagcacgcacacggcgtcatgacgcacgaagacttcgcggttgatcacccggctcatgccgccatcgaacttctcgtggcgcagttgcacgcgatcaagcttgtagaagccctggtaggcattgtcgcgctgaacgatttcgatcgtgttcggcgtcgatttggcaatgtccgtcatattcaccttcgttgtgcccgtgcaattcgcgccatcctaacgcgccaacgccctcggtgcagcccctttccggttgccgggatagacggcgggcgtcaaactcactctaatcagcttagtggcgaactgactgctttgttcgcagtcgaagcgctactctttttcgctttccatcgatttgtgaaggacacccatgtcgcttttaaaaatcgcctccgtggcctgtatcgccttgactctgggcgcctgccagagcctgttccagcctggctcgctgaagccgctggagaccaaaccggacgcctcggaacagatcaaacccggctgcgacagccctgactgcccgctggttaatatcgacaccgtgcacttcccgagcgagccacaactcgacacgctggtggaacaacgcctgttgcaaatgacccgcaccacaccgggcgccagcgtaccgccgacgttgaatgcctaccgcgacaagttcctgcgcgaatcgccggaccgcaacagcatgtacctgcaagccaaggtacgcgaacagcatgacggactggtgatcgttgaagtctccagctacctggatacgggcgccgcccatggcgagcccggccgtggcttcatcaactactcacgcgcgctgcacaaagagctgagcctgaccgacatgctgctgccgggccaggaacaggccttctggaacaccgcgaaagtcgcccacaacagctggctgatcaactcgcagatggaccgcgacccggagttcgtgaagaactggccgttccagaaaaccccgaacgtggcgctgaccagcgccggcatggtactcaagtacaacgtggcgaccatcggcccttatgcgttggggctgatcgaaatgaccatcccctacgcgcgcctcaccggcgttctcaagcctgaactgatacccgcgcgccactaaacgcccggcccagaatcagttgcaacagccctgccagcaccagcgccggcagggtcgcaccgacatccggatacaaattggccagcacgtgaaaggtggcgatgccgcccagccacgccgccagcgccggccaatgcaggctgccaacgctgccctggccacggcggcgcaggatgaagtgatccaccagcaccacgccgaacagcggcgcaaacactgaaccgatcagcagcaggaagttctggtactgcgccaacggcgcaaagcaggcgatcaaggtgcagatcacaccgatggccaacgccaggtgctcgaccttcatgcgcaacagaatcccgctggacacagctgccgagtgaatgtcggcgaaagcgttttccgactcgtccaacagaatcaacagcagcggaatgcccaggcctgcgccagccagtgcgagcaacagcgcattcacttcaccgctgggcgcgaacgccagggtgtaggccacgcccaggctcatcagccagaaattaccgataaaaaagcccagcgcagtaccaccgaacacgcttttggcgcgcttgccgaaacgcgagtaatcggcaatcagcggtagccacgacagcggcatggcgatggcgatgtcaaaacccaccgcaaaaggcatcgaaccgtcgccgggtttggcccacagcgcggccagatcggctttggcgaacaggttccaggtcagccacaggcaggcagccagcagcagccagatgccccacttgcgcaggatttgccgcacgaacgtcagcgggccgctaacggccagcaaggtcgccaacccgccgaaaaacagggtccacagcaacgggttggcgagcacactgccttcgctgaaggcccgcgtgccgagcaggctggcggcgtcacgcatcacgatgatttcgaacgaaccccagccgatcagttgcagcaggttcagcaatgcgggcaggctcgcgcctttggcgccgaggctgagcttgagcgcggccatggcggacagaccggtgtcgctgccgatcacgccgacggcagcgagcagcaaaacgcccaccagcgtgccgaggaaaattgccagcaatgagccggacaagcccaggcccggcgcgagcagtgcgccggtttgcaggaccatcaggccgatgccgagggagaaccacagggagaacaggtcgcgggcgctgaagactcttttgtcagcaggcaccgcgatgtccggcgaataggtgctgggttgaatgctcaagggtgttatctctgaggggcattttttgtttgttggatcgctatcgcgggcaagcccggctcccacaagggatcgcattccagtgtgggagccgggcttgcccgagatggcggcagcagaatcgccgccgccttcggatcagacctttttgtacagctgactgccttcctgcttgaaccgctccgcctgctcggccaggcccttggccacgtccacatccaccgcttcaatgcgctggttggccgcgtactcacgcacctcctgggtgatcttcatcgagcagaacttcggcccgcacatcgagcagaagtgcgcgaccttggccgagtctttcggcagggtttcgtcgtggtacgagcgcgcggtgtccgggtccaggccgaggttgaactggtcttcccagcggaactcgaaccgtgccttgctcaaagcgttgtcgcgaatctgcgcgcccgggtgccccttggccaagtccgccgcatgcgccgcgatcttgtaggtgatgatcccggtcttcacgtcatccttgttcggcaagcccaagtgctctttaggcgtgacgtagcagagcatggcgcaaccgaaccagccgatcatcgccgcaccaatgccagaagtgatgtggtcgtaacccggcgcaatgtcggtggtcagcgggccgagggtgtagaacggcgcctcgtcacagcactcgagctgcttgtccatgttttccttgatcaactgcatcggcacgtggcccgggccttcgatcatggtttgcacgtcgtgtttccaggcggtcttggtcagctcgccgagggtttccagctcgccgaattgcgcggcgtcgttggcgtcagcgatggaacccgggcgcaggccgtcgccgagggagaagctgacgtcataggccttcatgatttcgcagatttcgtcgaaatgcgtataggtgaagttttctttgtggtgcgccaggcaccacttggccatgatcgaaccgccacgggagacgataccggtcacgcgcttggcggtcagcggcacgtagcgcagcagcacgccggcgtggatggtgaagtagtcgacgccttgctcggcttgctcgatgagcgtgtcgcggaacagttcccaggtcaggtcttcggcagcgccaccgactttttccagggcctggtagatcggcacagtaccgatcggcaccggcgagttacggatgatccactcgcgggtttcgtggatgtgcttgccggtggacaaatccatcacggtgtccgaaccccagcgaatgccccaggtcagtttcgccacttcttcttcgatggacgaacccagggcgctgttgccgatgttgccgttgatcttcaccaggaagttacggccgatgatcatcggttccagttcggtgtggttgatgttggccgggatgatcgcgcggccacgggcgatttcttcgcgcacaaattccggcgtgatgatcttcggcacgctggcgccgaagctgtggccggcgtgctgctgctccatcaggccggcggcgcgggcttcttcaagcttcatgttttcgcggatggcgacgtattccatctcggcggtgatgatgcctttgcgcgcgtagtgcatctgcgtgacgttggccccggctttggcgcggcgcgggttcttcacgtgggcgaagcgcagcgcggtaagctcggcgtcgctcaggcgctgttggccgaaatgcgagctcaggcctggcaggcgctcggtgtcgccgcgcacttcgatccacggcgagcgcacatcgcccaggcccttgcgcacgtcgatgatcacattggggtcggtgtacgggccggaggtgtcgtagaccaccacaggcgcgttgatttcaccgccgaaatcggtaggggtcacttccaggctgatttcgcgcattggcacgcggatatccgggcgggtgccttgtacgtagattttttgcgagcgggtaaacggttgcacggagccggagtcgactttggccgattcactcaggtgcacggtattttttaatgttgtagtcatcacgggctctccaactatccaggcggtggatttttgtcggagcgaacctgggacggatggacgcactgaaaccagtgctgtgctcggtgcacgagggttgttcaataaacgaacaacatcccggacgaagcacaagaggactcgccgggtgacgagaaatcttgttccctacgcaggcgctaacctgatcaggttcaacgggatccggtatttaccgatctcagccttccaacaaggcaccccgacaagaacgcggccagtctagaccatgccgagggcaaattgccaatgacggtgcattcagcgtgatgaatggcgtgattgcgggattgttgcgccgtgatctggccactacactcgggcgttgcccaatgctcgcgtagcgttgagcacttaattatcgccgccatattcactctagggatcgccacatgctgcgcaaactctcactggctctcgccgtgtcttgtgcgaccaacggaatggtctgggcagctgaagcgcccttgtccgcccaaaccgatctggtcagcgtctaccaggaagcagcccttaataacgccgacctggccgccgcccgcgctcaatatggcgcgcagaaagaggtggtgccccaggcccgcgccgggctgctgcccaacctgtcagccggtgccgacagcaataacgtgcgcacccagatcgaccagccggcagccaccgtcaaccgtgacgcccattcctggcgtgcgaccttgagccagccgctgttccgcgccgaccgctggttccagctgcaagccgccgaggcggtcaacgagcaggctgcgctgcaactctcggccaccgagcagaacctgatcctgcaaagcgccgaaaactacttcgccgtactgcgcgcccaggacaacctggcctcgaccaaggccgaggagaacgcgttcaagcgccagctcgaccagtccaacgagcgcttcgacgtgggcctttccgacaagaccgacgtgctgcaatcccaagccagctacgacaccgcgcgcgccaaccgcattgttgcgcagcgccaggtcgacgacgccttcgaagcgctgatcaccctgaccaaccgccagtacaactcgatccagggcatcgtgcacacgctgccggtgttgccgccagcaccgaacgacgccaaagcctgggttgaaaccgccgggcgccagaacctcaacctgctggccagcaactatgcggtgaccgccgccgaagaaaccctgcgccagcgcaaggccggccacttgccgacgctggacgcggtggcgcaatacgaaaaaggtgacaacgacgcgctcggcttcagcaacccgaaccaactgccggtgccttacggtggcgatgtgtcgcaacgcaccatcggcctgcgcttgaacatcccgatctacagcggcggcctgaccagttcgcaagtacgcgaatcctattcacgcctcgaccagagcgagcaacaacgtgaaggcctgcgccgtcaggtggtggaaaacacccgcaacctgcaccgcgcggtgaacaccgatgtggaacaggtgcaggcgcgccgccagtcgatcatctccaaccagagcgcggtggaagccacggaaatcggctatcaggtgggcacgcgcaacatcgtcgacgtgctggactcacagcgccagctctactcgtcggtgcgcaactacaacaacagccgttacgactacatcctcgacaacctgcgcctgaaacaggcagccggcaccttgaacccgggggatttgcaggacctggcgcgttacctcaaggccgactacaacccggacaaagacttcctgccgccggatttggccaagacagctgccgagcagctcaaagcccgcccgggatcctgagcacaaaaaaatgtgggagctggcttgtgtgggagctggcttgtgtgggagctggcttgtgtgggagctggcttgcctgcgatacagacacctcggtccttcaaatacaccggggtgatgctatcgcaggcaagccagctcccacattttgttccgtgttaactcaataatctgtccaggccatccagcaagcgtttgagcgcgccctggttggcctgcatcaccttcaaccccgcctgcgccatcctgcgtgcatcctgcggcagttcaaacagctgccgcacggcttcggccagcccatcggcgtcatccaccgctcgcatcgccccggcttcacgcatcatcgcggtgatttcgaggaagttgaacacatgcggccccatgatcaccggtttgcccagcgcggccggctccaacgggttgtggccgccggtggccaccaggctgccgccgacgaaagcactgtcagccaaggcatacagaaacagcaactcgcccatggtgtcgccgagcaagaccgaggtctgtgccgtcaccggctcgccgctggaccggcgcaccgtggcaaacccctgctgcgtgcacagctcgaacatcgggccaaaacgttcctgatggcgcggcaccagaatcagcaatgcgttggggtagctgtcgagcagttggcgatgggcggcgagcaccacttcgtcctcaccttcgtgagtgctggcggcgatccacaccggccgctcgctggcgccccattgttcgcgcaaggcggcggcgcgcaccggcaattgcgggtcgatggtcaggtcgaacttgatcgaaccggtgacctcgaccgtttccgggcgcgcgccgaggcttagataacgctgggcttcggtgtgcgtctgcacggcgaacaggctcatttcggccagcatcggcgcggtcaacttggcgaaacgcccgtaacccttggccgaacgcgccgacaaccgcgcattggccaaggccactggaatgccgcgttgcgcgcaggcatggatatggttgggccacagctcggtctccatgatcacagccagcttgggctgcacccgatcaagaaaccgcttggccgcacacggcaggtcgtagggcaggtagcaatgctgaatgcgcggttcattggcgaacagcgcctgaatgcgctcggagccggtcggcgtcatgcaggtgaccgtgatcggcagcgtcggatgacgcgccatcaacccgcgaatcatcggcgcggcggcaatgctctcgcccactgaaacggcgtgcacccagatcccgcccggttgcatcaccggcaggccccaggaaaaccgttcccccacgcgcttggcgtaggccggcgccttgcgcgcacgcagccacaaacgtaatgccaccaacggcagcgccaggtaaaacagacagctgtagagagttctattcatggcggcggagtttatcggctttttcagtcaatcgcctgcaggcactcggcaaatcgttcggccaaaaagcgtgcggcggggccgaggtgttcgtcgcggcgccataccagctcaacgaccagggctggcggggtccattcgctgtccagttcgaccatctgttgctgataggtcgggtactgcacgatatgccgtggcaaccaggcccagcccaggccgctcatcaaccattcggcgagcacgtagaaactgtccgcacgccacaccaaggggctggcggcttcgctgccggggtagacgctggtctgggtcgacatcagcaattggcgaaactgcgccaggcgctggcaggtcacgtaattttcctgggccagcgggtgattcacaccacacaccgtgaccatctccacactgcccaccacccgccgctcaagggcttcggggatctggtcgtgatagaacaacaggcccaaatccgccttgcgctccaccagcttgcgcgccacatcgccttgggctgcgctggagagctgcacttccagatgcgggtattgcgcggccaatgcttcaaggctgtcgagcacgggctggaacaacatggcttcgtcctgggccaggcgcagcagggcttcttcaccacgtgtcaacgacagcgcgcggccgttgaggcgctcgcattgacgcaagacttcgcgcgcctcctccagcaagacgctgccggcttcggtcaagacgggctgacggccgctgctgcgctcgaacaggctcaggcccaagtccgcttcgagcagtgcaatgccgttgctcaccgccgactgcgccttgcgctggtgacgcgccacggccgaaaacgatcgctgttcggcgacgctgacgaacaggcgcatctgctccaggttccattgcacactcatggctcaacccatctttaaatcggataggtaatgactttatcccatcttgttaaacgttagaatggcgaccttatccagcacgccacacaccgaggacacccccatgaatatcgcctatgtctacctggccattgccatttgctcggaagtgatcgcgaccgtttccatgaaggccgtcaaaggcctgagcacacctatcccgctgctgctgatgatcgtgggttacggcgtggcgttctggatgctcaccctggtggtgcgcaccgtgccggtgggcgtggcgtacgcggtatgggcgggcctggggattgtgatggtcagcgtcgccgcgctgtttatctacgggcagaagctggatgttccggcgatgctgggcatgggcctgattgtgctgggtgtggtggtgattcagctgttctcgaaaaccgccgggcactgaccactcttcaacagcctgtatactgcgcctcttgtcttgaacactgaggtcgccgatgccatccgttatttccaccgacgttctgattgtcggcgccggggttgccggcctctggctgaatgcgcgcctgcgccgccaggggttttccaccgtgttggtggaaagcgccaccctgggtggcgggcaaaccgtgaagtcccaggggattattcacggcggtgcgaaatatgccctgcacggcgcactcaccggcgcctccgaggccatcgccgacatgccgcgccgctggcgtgaagcgctggcgggcaacggtgagctggacctgtccggcgtgcgcttgctgtcggaagcccattacctgtggtcccccggcacaattgccggcaacctcaccagtttcttcgcgagcaaggcggtgcgcgggcgcgtggatcaggtcaagggcgaccaattgcccccggcactgcaagaccgccgcttcaaaggcaaggtctatcgcttggcagaactggtgatcgacgtgccgagcctggtcgagcgcctggcgcaactggccggtgacggcttgctcgccgggcggcacatcgaaccgctgcgcgaaggcgacacgctggtgggcttgaaggtggatggccgcgaaatccgtgcccagcgcatcgtcttgagcgcgggcggcggcacggcggatttgcttggcgccctgggcctgagccagccggccatgcagacccgcccgctgcacatgatcatcgccaagggccccggcctcaaaccgttgtacgcccactgcctgggcggcggcaccaagccgcgcatcaccgtcaccacccacccggccgccgatggcaactgggtgtggtacatgggcggcgacattgccgaggccgagggtgtggcgcgcacgccggaagaacagatcgccaccgcgcaaaaagagctggcgcaactgctgccgtggatcgacatgagccaaacccggtgggcgaccctgcgcgtcgaccgcgccgagccgctgcaatcgggcctcacccgccccgacaatgccttcctcgccgaacagggccgcttgctcgtcggctggccgaccaagctggcactggcgccggatttcgctgatcgggtgctcagtgcactggagcgcgacggcatccgcccaaccgccaccgaagccttgcctgacctgccgaaaccagccatcggccaacctgcctgggagcacctgttgccatgagcctgccgaccctgcacgacctgcatcgccccttgggcagcaccggcctgctggtctcgccgctgggcctgggcaccgtcaagctgggccgcgaccaaggggtgaaataccccagcggcttccagattccaaacgatgacgaagcgcggatgttgctgcgccaggcccaacaattgggcatcaacttgatcgacactgccccggcttatgggcgcagcgaagaacgcctcggcccgctgctgcgtggccagcgcaaagactgggtgattgtcagcaaggtcggtgaagagttcgaagagggccagtcccgtcacgacttcagtgcggcccacacgcggatgtcgatcgagcgcagcctgaaaaggcttgaaacggattttatcgatctggtgctggtgcactccgacggcaatgacctgcatattctcaacgattgcgacgtctacgagaccctcgcggcgctgaaaaaagaaggcaagattcgcggcttcggcttctccggaaaaaccgtcgaaggcggcgtgaaggctctggaaaggggcgattgcgccatggtcacctacaatctgaacgaacaggccgagaaagccgtgattgattatgcggcggcgcatggcaagggcatcctggtgaaaaaagctttggccagcggccacgtgtgcctggaacccggaatggatccaattcacgccagtttcatgttgttgtttgcgcaaacgggcgtcgccagtgctattgtcgggaccattaatccgctgcacctggcccataacgtggcgaccgctgcccaggtcattcgtcaactctgatgccgcccacgcggccgaccccgtcgcaagaaggagccgacatgccgcgaacgctcataagaaaaaaccccagcaacttcaaaacactgccgctgcacgtcgaagccacacccgaaggcctgagttaccagagcgtgggcatgccgctcaacttcgcccagaccctgcaacggcgcaagccggtggaggtggcagaccctgaacgtttcgcgctggaactggccaacctgggcgtgtcggtacgcctgaccctgcactggcaaaacaaggattactgggtgctggtgcgccagcgccgccaggaccgtggtgacgtggtgctcaagctgatctccggctacgtccccgcccatgaactgaacctgccgctgcacaccgcgatccaggaaattgccgaagaatgtttgctggagacgcccgaaggctggctcggcgggcgcttcaatgacacctggctgccggcgccctactcagccgccctgcattaccgcgaagccctgccgtttcgcctgagccccttgtccggcgccgcccgcccggtgcgttgcgccaccacccaactgatcgagcgcccacgggcctatgtacacctgccgacggcgtcgttgcagttgatttatgacctgcgcctggaagtgcccagggaagccaaatccctcagcctgttccatgtggatgaacggctggaaggcgaccagttggtggcgcgccttgatcgccagcgcccggatttgtacctgatgccgttgaaagacggtcagccgctggccgagttgtacaccgtcaagaaagaccagctcatcccggcgagcacacgcggcttgtacctggcggaaagcttcgcccaacaggaaggctggctggtgcgcgacgagcggattcgctggaaggattggctgcgccaacaggggttggcggaaccggagaaagagtcgaagttgaagcgcttggcacagcgggtgctgcgcaagattgtgccgaagaaaaaaaccaaggcctgaagccattcgaatgtggagctgctttatgtgggagccgggcttgcccgcgatggcatcacctcggttcacctgataaaccgaggtgcctgcatcgcaggcaagccagctcccacaggcgaccgcagtcaaccgttgagcaggcgctccaggccgaccttcagcggcgttggctcaggcagcgtgaaactggccaacagccgctgattattcgcccgtgaatgccgaatatcgcccgagcgcgcgggcccgtaagtcaccgccggcaacttgccgacaatctcttccagcgcctgcaacacctgcttgagcgtggtcgtgcggttccagccgacgttgatcgcacccagcggcgcgtccggcacctcgatggcttgcaccagcaagtccaccaggtcgcccacgtacatgaaatcgcgggtttgctcgccgtcgccaaacacggcaatcggcaggccctgctgcacgcgctcgctgaaaatgctgatcacgccggagtacggcgaggacggatcctgacgcggcccgaagatattgaagaaacggaaaatcaccggttccaggccatgctggcggcgatagaagtcgaagtagtgctcgcccgccagtttgtccgacgcataaggcgtcaacggtgccttggtggtctcttcgtcaatcgaggcaccttcgccgttgttgccgtacaccgccgcgctggacgcaaacaccacgcgcttgacgccggctttgcgcatggcctcgcagacattcaaggtaccgacaaaattgctctggtgcgtgctgaccgggtcatccacggaggcctgcaccgacgccacagcagccaggtgcaccaccgccgtcgccccgatggcggcttgcgccaccaacgcggcatcggccacatcgccttcaatcagttcgacgctcgggttgcccaacggcaaattgctgcgcttgccggtcgacaggttgtccagcacccgcacgccataccctttggcgagcaaagcatcaactaggtgcgagccgataaagccggcaccgcctgtgatcaggacccacttggccgccttactcattgttgcgaatcttctcgacgatggccgtggtcgagctgttctcaaccaagcccagcactttgaccttgccaccgtaggcgctgacgatatcggcccccacgacctggtcgacggaataatcgccgcctttgaccagcacgtccggcttgacctgagccagcaagttttccggggtgccttcagggaaactgattacccagtccacggcgcccagaccggccagtacggccatgcgccggtcgacgctgttgatcggacggcccgggcctttgaggcggctgaccgacgcgtcatcgttaacggcaacgatcaggcggtcgccttgggcgcgcgcctgctccaggtaggtcacgtggccagcgtggaggatgtcgaagcagccattggtgaacacaatgctttcgttgtgggcacgggcatcgtcgatggccagcagcaattgctcgatacccagcacgccgcgttccgagccttcggagcgctggatcgcgcggcgcagttcaggtgcgctgatcgctgccgtacccaacttgccgaccacgatgcctgccgccagattggccagggccacggcgtggggcagttcctcaccggccgcaatggaggcggccagggtggaaatgaccgtgtcgccggcgccggtgacgtcgaacacttcacgggcgcgcgccggcaggtgcatcgccgggtggcccgggcgcaacagagtcataccgtgttcgccacgggtgaccagcaacgcgccgaggtcgaggtcggccatcagtgtggcgcctttcgtgacgagttcatgctcatcggcgcaaccgccgacgatggcttcgaattcgctcaggtttggcgtgatcaggctggcgccccgataaatcgagaagtccttgcccttgggatcggccaatacaggaatgcccttggccttggcggcctggatcagttcctggtgatttttcaaggcgcctttgccgtagtcggataacaccagcaccttgatgccttcaagcaacgcgtcgacctggccactcagggccaaggcatcggtggcgaaaggttcttcgaaatcgatacgcagcaattgctggtgccggctcatgacccgcagcttgacgatggtcggctgatgggcgatgcgctggaacagcgcgcgcacgccggcaccgcgcaggctgttggccaggctgtcggcggcttcgtcgtcgccggtcacacccaccagggaagccggggcgccgagggcggcaatattgagggcaacgttggcagcgccacctggacggtcttcgatttgctcgaccttgactaccggtaccggtgcctcaggggaaatccgtgaggtaccgccatgccagtaacggtcgagcatgacatcgccgaccaccaagacaggggcttgatcgaatcgcggcatggacaacttcatggagcaacccacatacaaaatgaacaggggcgcgatattagcacagggttacaggaggcttgtggcgggcgtgacagaagatggtggacgatgttgtgaatgcagcgcttaacaaatgtgggagcgggcttgcccgcgattgcggtgaatcagccgaaacattcggtgactgacactccgctatcgcgggcaagcccgctcccacattaagcctgtgtacccttgaatcaggtgatatcggccgataccggtgcatccaggcccatggcgtgcaggcgggcgtagtaaccgttctgcgccagcaactcgccgtgggtgccacgctccacgatccggccgtcgtccatgaccagaatcaggtcagccttctcgatggtggacaagcgatgcgcgatcaccagggtcgtgcggccctgcatgactttgtccagggcggcctgaatgtgccgctcggattcggtatcgagggccgaggtggcctcgtcgagaatcagcagtggcgcgttcttgagcaacgcccgggcaattgccaggcgctggcgctgaccgccggacaacagcacgccgttttcgccgaccggggtgtcgaagcccttgggcaactggtcgatgaagtccttggcataggcatccgccgccgccgcctcaacatcggcccgtggcgcgccggccaggtcaccgtatgcgatgttattggtcacggtatcgctgaacagggtcacgtgctgggtcacctgggcaatgtgcttgcgcaggttgaggagcttgtaatcttcgacctctacgccatcgagcagaatctcaccgctttcatggtggtagaaacgcgggatcaggctggccagggtcgacttgccgctgccggagcggccgaccagtgcaaccatctgcccgggctcgacgctgaagctgatgtccttgagcacatggcgatcggtgcccggataagtgaagttgagctgacgcacttccaggcggccgctgaccttgtcgcgctcgatcgtgccacggtcgacttcctgctcttcgtccaactgctcgaagatgctttcagcaccggccacgcctttctggatggtggagctgacttccgacaattggcggatcggcttgggcagcaggccggccaacgtgatgtaagccaccatgtcgcctgccgacgcatcaccgcgaaggtaaagcacgaggaacatcagcaccgccatggcggtgtagatcaccaactgcagcgccggcgtatagatcgcaccggtgcgggtcatgcgcagttgcttgtcggtgttgctcaggctggccttgaggaaacgcttctcctcgtagacttcaccaccgaagctgcgcaccacgcggtaaccctggatggtttcggaagcgacgtgggtcacgtcgcccatggccacctgaatcttcttgctctgtttacggaattttttgctggcagttctgaccatcacggcaatcaacggcaggatggcaaccatcaccagcgtcaggcgccaattcatgaacagtagggaggcaaacaggaagatcaccgtcatgccttcgcgaatcaccaccttgatggcatccgtcgcggcccccgtgaccatggtcacgttgaaggtgatgcgcgagatcaaatgcccggagttgtggttgtcgaagtagcgatttggcagcgtcaacaggttgttgaacagctgtacccgcaagtcgtggaccaggcccagggaaaccttggccagcaagtagttgcccaggaacgaacccagcccctgccaggcggcgatcagaatgatcagcaaaggaacggcttgcaacaattgcaggtcgcgcaggaacggtacagtgggaaacagcaccgcttgcgggttggaaagaccgtcgacgaagtacttgaggatgtaccccagcatgggctgggtcgacgcgaaaatcagaaatccgacgatactcaacgcaaacaagcccatatagggcttaacgtaactgagcaggcggaagtatattttcaagctcgaagggcttgcgctcggactggagtcggtcatatcacgcggcgttttgaaaaaggaggctgactttagcacagcttctctgttgtacttgcacccggcatgaccctcggcccggttggatccaaccgaagacactatagagccactaccttaagatggtcggctttctcattctggaacggcttttatcgtatgcattgcaagcgcctcaactatggctcaaatcgcgttttcgacttcctggtcctgtggattttgcccattggcttgttgctgctgctgagttcgctgttctacgtcaccaatcgcaatgtcatgcaccgcctctactacggctttttcagcgtgccgacgttgttcctgctgtgcctgcgccctcgtgaaatcaaagagctgctgcgcgagcccgtggcgattgcctttctcgcgttttgtgcctgggcgctgaccactgtgctgtggagcccggcgcccaccggcgactccaacctgtacaaggtgcccttgcaaacgttcatgctgtttgccggctgcggcttgctgctgcattaccgcaacgacctgtttcgaccgatctttttcagcgccgctgtcattgcactggtggtatgcctgctcaacctggtggcgtttgtcaaaggcttccagccgggaatgcgcatgatcggcggcctgggcgccctcgacaacccgttgctgagctcccacctgtttggttttttctgtgtgtattggctgtatgtctgcgtcaataccaagcacctgcgcacgctttggctcagtgtccccgccgccgtggtcatgaccgcagcagtactggcaacaggttccagaaccccgttggtggccctggttctggccgtgttctggctgggcctgctcagccgcaatcgccgctcggcgctgatggttgctggcctcgtactgaccgccatcgctctgctgctgttttacccggagtcgatcaccgagcgcggcagctcatttcgtatcgagatatggcgcatcattctggaccgtgtaggcgaccatccctggataggccacagctacgattccgaactttacgtgaagcctgcgaactatgatgccgagccacttcgcgaacctcacagctttgcgttgggcgttctgtattacgtcggcatcatcggtttcatcccgtgggccttcatgcttggctggagcctttacaaaggcttgaaagaacgcgcccagccgctgttcatcctcgcgtcctccctgctggcctacggcatcggcgccggcctgaccgaaggcggcggcattctgtcgcgccccaaggaacactggttcctgctgtggattccgttggcactgatcgtcagcctgagcctcgcacaacgccgccacagcctgctgcgcttgccggtcaagacattcggtgcgcaggcctttgaagccctgtgcaaagatgctgtcatcattgaggaagatggcctcggccccaaagtactgcgcctggcagatggcagcttcctgaagctgttccgggcccgccgctggtacacttccggtggcttcaacccctattcggagcggttcgccagcaacagtgagcagttgcgctcgctgggtattgcttcaccgctgattctcgacttgtatcacctgcacgatggcagcagcgccgtacgctatcagccgctacccggcctgacactgcgccaggccctgcaaagcctggacagcagcctgcgcgaatcgctgatcgaacgctttggccggttcatggctcagttgcatgagcgcggggtttatttccgctccctgcatctgggcaatgtgttactgctggaggacggcgagttcggcctgatcgacgtagcggacatgcgcatttatccatcggcactgcgctacacattgcgccagcgcaacctgaagcacatgcaacgctatgcgcaggaccgcaactggttgttcgagacccactttgcagagctgaccaaaggttacgcgaccgttgcatccccgcaagccttggtcaagattcgccaacaggtacagacgctggctcgtccagccacctgagccgtgaagccgatgcgccccctgtgcggggcgcatcggcgcggtatcagtctttttccagcggggaaaaatacaaccgcaccaaaccccgccaggttttcttgttccacgcccgaaacgggatctgcgccagcagctctcgcgccaacgcacggttgcggttggacgtcttgaggaacatggagctgaggaacttgtaacgcacctcgtcgtattgcgggtgatcactgaacaacgcatacgaacgcaagatattgtcgatcatgaatcgatggttcttgtacgagttggtggcgtgcttgcggtagcgtgccatgaccacattcaaaccatcgatgaagtacccggcccgggtaattttcaactcgatcaacaggtcttccaggcgaatttcagggtcgaaaccaccgaccttttccagcgcttcacggcgaatcatcagcgtgggcgcgggcgggtagggtttgcgctccatgaacatgtcgtcgaagtccaggcgccggaaaggcacgtcccggcgctggcgtttctccgggaacagctcgccgttggaatcgatcagttcgatgttaccggcacagatcccgacctcaggcttgccatccatataggccacctgcgtcgcgatgcgctcgggcagcataatgtcatcggagccgaacggtacaaccaaggggccccgggaccgtgcgatggcgccattgagcgtgttggtcagcccttgattctgctggacgcgaaaatcaaacgtgtgctgttcctgtaagcggcgaatgcgctcgacgctgtcgtctgtcgaaccgtcgtcaatcaccagcaattcgatattggggtatgtctggttcagaacactgagaatgctggcctcaatgtagggcccatggttgtaagaggcgatgatcacggtgaccaaaggctgactctggttcatacattagtcctgtgtgcttgagccaagcctgagtcgatcaattccaggtactcctgacggaacacctcaatgtcgtgctgcgcctggagatactggtaagcctgctcacccttttgcgccagcgcttcagccggcaacgccaagtaggtatccagcgcctcggtcagctgcgacacgttggctggttctaccgcgaggccgcccgccccttcaatcagcgggagcatggcgggcacgcttgaggcgatcaccggcaagcgaccgctcatgccttccagcaaggccaggcccaggccttccgccagcgacggcatggcccaaatatcaaaggcacgaacgtactgcagggcattttccttgaagcccagcaggtgcacgcgcccactcaagccaaggctctggatctgcgccgccagactggactcttcccgccccgcaccaatgatggcgagttgggcggtggggtacttgtccttgagcgcagcaaaagcctgcaatagaaacgtatgccccttgaccggtaccagccggcccagggcgccgatcagacgcaccgaaggatcaatgcccaacaattcacgcgcacgctcacgggaatgctgcagggcttcggcctgttcgatatcgatggcattggtgatggcgtaggtattgctatcggtgaaaccgcactggcagtccagcaggtattgcttaacagcaggcgacacgccgacaaaccgccagtgcctgtcgatccagcgctgcgcctgcttgcgtcggtaaacacggtcatattcgccgaaaccgtgggagataccgatacacagcgggatcttcaaccagcggttcagttgcaacatcatgttgaccggcttgaagcggttgcacaccacgacgtcgaacttttcctcacggcagaacttgtacagctgccacatggcgcgcagcctcaagcctttgagggacttgtcggaaaactcgaaatagacggaagaagccgcacggctgacaggctcccctggccccgggcggccacgcaggaacgcggccgtgacttcatagcgctccgccggcagtgccttgacgatctgttcggccaggtcggcgaagtcatgggatttaacattgtagtcaggctgcagttgcaggaccttgaaacgccgactcataactctcctcgatggaaacctgtggcatcaacgacccaggatgtttcagcagccagtgcctcgacgtattcgatagatggctcgggttgcaacggccactgattgcgcttccaacagacaaaatggaaatacggaaattcccgttcgccatccctgtcgttggtcaggcggccgttattccagaaccactgatgagggaagcgatcactgccgtcatgccacttgatgacaccacccggcgtactgaacgcctcggtgaactcactgcgtcgacgccaggggttaagcttgcccaccagattgaacaatggcttcggaaaattcttgcgccacaggaaaatacggctgaacgcgccttcatccagcgcatgatgcacctgatcggtaaagcgcgcctcccaatccttgatctgcatgaatgcatgccgcttcctggcggtgttacgcatcaggcacaaatggccggcaacccgtcgctcgtgggttgaaaacaggtcatagccggccaggcgctcgcaggtaaagtaattgcgcaggttgccgtagataaggtccagatcgccaaacgcccagaaatcgtaaccgtcgagacgatcggcatggatatgcccgagcgccggcttgatatcacataacttgtaaggcgcttgaggcgcaaagttgatgtacagccgctgcgaaaccagcgcgcagtaatcggcaaacgtgacgctttcaatcctgacattgtctggcacgtgctcgggcatcgggcaatcgctgaatatcagccagtcgatatcagcattgcgcccacagctctcaagaaaaaacggcatccaaaatggccagcgaccaaagtaagggataagaaagagaatgcgggggcgctgattgatcactctggggactcactgtcattgattcgggagcgcacgacgctccaccacgttgcgttacgttacttgtgcttgatgaaccaaaaaagttcatggcgccggatggccttgcggaaaaactcgttctccccccagggcgagacagctcttccagccagcaggcgctgaatgacgcgccgcacacgccgtttgagcggcatcctcggctgcaagtcatgcatcatgccaagcgacatcgccttgtcgcactgccgctcttcagataccggcaggcaataaggctgcaaagtgtacgttgaatcaaagcatggtggcaaagcgataccagcgcccgaatctcccatcggccaacggtcattgtcatgcagatggttggcgtaaccgagcaacgtggtcggctgccactccagcccttgcaaggcctccagaacggcttgctgggcgcagatatggtcggggtgcggatccagcaccgcatggggcagcacgatgacttccggacgcgccatcaacaacaccgccctgaggtcagccagcaggttgttccaggttggtcgaccatcggcgtcggccggcaaggtgaaggggttgaactggcgaaacaggcgaatatcctccagcccggcctcccgcgaggccaccgcacggtcgggctcggccttcatcgccgccagttgcaggcagaaatagcccaactgcacgcaatgctcctgggagacaccggcccagcgcggcacggcaatgctgtcccaggcacgcagacggcctttgagccgcgcggcttcaggtttgcccagccccatgtgctgatagtgctcggcctcgatctcgccggccgtcaatgtcacgatccagggctgcgtcgcctggctgtacaggccgaaggccgcaagttcggcgtcgtcggcgtggggcgcgatcaccatcactcgctgttggcgcacgtcaggctggcggaataccgagagaatcggctcaccctgcacacgacagaaccggctgcgcaacagcagctgaccgccaagaagcgcctgcgcctgaccggtaaggttcagataacgcaagccatccacaccgcgctcgaacacctggcgatcgcctccgggcaaggcgacatagggatcgataaaacggcccagcacactgcttttgaggcgcaacgccaggatcagcgtttcatcgccagccagtgccaatgcctgatccagcaccaggcagccccgtttcaggctgaccttcggctgctcggtatccgccgcaaactgatactgatagtcgtccttgggcgagtagaaaaggtggtcggcaaaccaggcctcgtgagcgacccacgccagcaccgccagcaccagcggcaaccaccaggccaccaccacgcccacgccaatcaacagcagcaacccgaccagcaggctgacgcgcttgttgcgacgatggcgcttgagcaacgcctgcttgcggctcacggactcactcatgttttgaataccggcacggggttgcaccaacggtccttgtactcacggtcagcccggccaaatgaaaaacgcagcggcttgccggcttcccgcgcctgttcccaggcgctttgtgtattcaggaaactcaagacgctgcccgggctgaacacgcgggtttcagggtcgacaccgccattgatgtactccacgctgacccactgcggagcttcaacgcggtacaccaattgaatggcgattggcgcatcgttgaggaaaatcaccgagccgatcagccactcacgcaacagttcgatcacctgcgccatgtgctcggcaccggtggcgggaaagccccagcggcgctggaacaaatcgcaataaatggccgccagctctgcgctggaaaactcatggaccgcacgcaccacgccgccggcctcttcaagcaggcgtaattcgcggcgctggttataacgaaactttttcgacaattcttcagggctgcgcgccatggccaactgctcggcctgaggcttgagggcgacaaagcgcccctcattcagcgccgacagataccgcccgcgatgacgcaagggcgcctgggcatcggcagccgcaggcaggatcaactcggcattacccaaatcgaacaaccccttcttgccctggcgcttgagtacatccttggacaaggccaagtcctggccccaggtggcaatgcacgccttgagctcgctaccctgctcccacgccagataacgcacagggatttcagccagcccggccagccgctcaaccacttgcgggtgagtcgccacactgccgccaaaacgctgccaggcatcgctgtaggtggacgcatcaacgacggaccagccacgctcgcgccagccttggaatcgattgagcatcaagccctcgcggtcagttcgagtacgtgaggcaactgccagaacgccgcacgcacggcctgatccgagaaccgctcgtgcaggcgctccagcatcatttcggcacactgctggtgctgctgacggtccatggccgccaagtgacgcaacccttgccccaagtgttcggcgtcgccaaacggaaacagtatgcctacaccctcaaccacttcacgggcgccaccacaggaggtggccagcagcggcacgccagcggccatggcttcgagcagcaccatgccgaaaggctcattgtcggaactcagggcaaaggcgtcgaacgcacggaaataacggcgcgcatccggcacctggccgagaaacgacacgcggtcagcaatatccagctcgcgggccaacgccttcaggtctttttccaggcgcccgctgccgaggatcgccaggcgactctgcgcaggcaaatgcggcaatgcctgggcaaagcccctgagcagtgtcgcctggtccttgtcggggtgcagacggccaacgttgccgaccacccattcatccggcgacaaacccagggcatcgcgtgcggcatcggccggcacttgcaaggcctgcatggcctcgataccgatgcggttatacaaggtctggatgcgcgccgcaggccaggcgggcagacagcggcgcatgtcatcacgcaccgagtcggacacacccagcaggctcaggcgcttgcggaaaatcaacgcgaacagcttgcgggtaccgcgtttgtagtcaccaaacgcgtgatgcacgccgatcaccggcaggcgcgtggccagcagggcgatgtagatcggtttgaagcggtgggcgatgcagaaactgaaattgcgcgaggcggcaatcttgcgcagctcgccgatggcacccagcttcaggccacgaatggccttggagctgtattccatgaacaacacttcgtcactggcacacccggcggcgacatcggggtcggcgaccccggtgagaaacaccgtggtcaccttgtagccggagcccgcgaacaggctggcgtactgtcgtgcgcagtccaggaacggcccgtcatagccgtggcagaactgcaggacgtgacgctcagccgaccgtgtcataagggtccacgccgtctttgacgaccaggatgtcttccatgatcaggtactcgaggtcggagccgaagaacatgttcagcgcgtcggtcggcgaacagatcatcgcttcgccacgacggttgagcgaggtgttcagcgacacaccgttgccggtcagcacttccagctctttcatcatgtcgtagtagcgcgggttgtattcgcgcttgagcacctgggcgcgggaggtgccgtcttcatggaccacttccggcacgcgggttttccactcttcagccacttcaaaggtgaaggtcatgaacggcgccgggtggtcgaccttgatcatctgtggggccacggtgtcgagcatcgacgggcagaaaggcctccagcgctcgcggaacttgatctggtggttgatacgatccgccacgccggtggcgcttgggcaaccgatgatcgaacgaccgcccaacgcacgcgggccaaactccatgcgcccctggaaccaggccaccgggttgccatcgaccatgattttggcgatgcgctgcggcatgttctcgatctggcgccacttgggcttgctcgcgtgcttggcgcaggcggcaatcacgtcttcgttactgtaggacgggccgagatagacgtgttccatcttctcgaccggtacgccacgggcgtgggacacgtaggctgccgcgccgactgcagtaccggcatcgccggacgccggctgtacgaacagctctttcacgtcgtcacgggcgatgattttctggttcagtttgacgttcagtgcgcaaccgccggcaaaggccagcttgccggtgtctttgaggatatcgcccaggtagtggtcgatcatctgcagggccaacttctcgaacagcgcctgcatgctggcggcgtagtggatgtagggctcgtcggcgatgtcgccttcacgcttcggccccagccactcgatcagtttaggcgagaagtagaaacccttgcccttctctttgtagcggcgcaggccgatgacgttggcgtagtcggtgttgatcaccagttcgccgttttcaaaggacgccaaacgcgagaagtcgtatttgctggcatcgccatacggcgccatgcccatgaccttgaactcgccgtcaagcatctcgaaaccgaggaactcggtgatcgcaccatacaggccacccagggagtccggatcgtagaattccttgatcttgtggatcttgccgttttcgccgtagccaaagaacgtagtggcgtattcgcccttgccgtcgatgcccaggatcgcggttttttcctggaagccggagcagtggtaggcgctggaggcgtgggccaagtgatgttcaaccggctcgatcttgattttcttcggatcgaagcccagttgctccaggcaccagacgatcttgttgcgatagcgcttgtagcgacggttgcccatgaggattgcgtcaagggcgcggtccggggcgtaccagtaacgcttggcatagtgccagcgcgcctcgccgaacaggctgatcggggcgaacgggatcgccactacgtcaacgtcggaaggcttgatgccggcctgttccaggcagaacttcgccgactcgtaaggcatgcggttctttgcatgtttgtcgcgtacgaagcgctcttcttcggcggccgcaatcagcttgccgtcgatatacagggctgcggaaggatcatggctaagggcgccggacaggccaagaatcgtcaatgccacaggggtctagcctcttttagtctgcatgcaggcgggtcgcgcctgaaaaaagtgtgcttcccgcctgggcaggaaacagctaaagggcgggattataacttaaaagcagggggaagctgttagcggctggcgggtcactggtagatctcgatgctgccgtccttgccttgccggtagatggtatagggcagcaccagcgtatctgccacgccggaggcgagcgcttcgatggcgatgatcggcaggatattgcctccgcgatcagacagacctacatcattcaggcttttttcaggcttgggctcactattcaaatggcaaaaaccatagatcaccccactgtagatacgcggcacgttctcgcagtgactgcgcgaatccttcaggctttgactggccaccgcatccgggcgaaagaccgtattgatcgtgccgcaaccgaacagtgacaagcacgccgcgccccacatgactttggacacaactctcatgacccactccctttgatctttcaacgatgaccgacacgctaacatcgaagccactgaagacccaacgcggacagaccatcggcagcgtaggaccattcccaaatgataaaaattgcccgagccactaaactcgcgcccttttgcgcgtttacaccttgagtaacgccacggattccggctgactgatgaaaaccctcacttgcttcaccctgctgctgcccggcctgattgccctgtgcaacaccgccagggccgacgacaccgccctggtgctcgaccccagcgtggtcaccggctcgcgcagcgccagcccgacgttcgacctgccctactcggtcgacagcatcagccatgaacaaatcagcgacggccagctcggcattaacgcctctgaagccctgtcccgcgtgcccggcctggtggtgcagaaccgccagaactatgcccaggacctgcaaatctcatcccgaggcttcggcgcccgctcggcgttcggcgtgcgcggcatcaagctgattgccgatggcatccccgccagcaccccggatggccagggccaggcggccaccttcaacctcgacaccgccgagcgcatcgaagtattgcgcggcccagccgccacgctgtatggcagcaatgccgggggcgtgatccagatgttttcccgcgacggcgaaggcccgccgcgcatcggcgccgagacgctggtgggcagcgatggcctgaacaagaaccacctgactgccgagggctcggccaatggcgcggggtttgtgctcgacgcctcacgcatggacaccgacggctaccgcaaccacagcagcgcgcgccgtgaccagaccttcgccaagctcaacttccagccggatgacgacagcaagctggcgctgatttacagcagcctggagcagaacggtacgcaggacccgctggggcaaacctgggcgggctacaaggccgacccgcgctcggtggcaccggccgcgctgacgtacaacacgcgaaaaagcatcgatcatcagcaattggggatgaattacgagcgctatttcggcgatgccacgttacaagtaaatgcctacacgggacggcggagtgtcattcagtacttgtcgatacccggcggcacccccgccgacaagcgcggtggcgtggtggacttcgaccgcacgttctacggcggctccctccactggctgcaacccatcaccagcgcccccggcgacctgaccctgatcaccgggctcgactacgaccgcagccgggatgatcgccagggctattccaacaccctcgacggcgtgcatggcgtcaaaggcgccttgggccgcgatgaagtcgacaccgccaccagcctcgacccgttcgtgcaagccaactggctgctcggcaactggaccctgcaagccggcctgcgccacagcaccatgacgatggacgtggacgaccacttcctcagcgacggcaacgacagcggcaacaagacctatcaacagaactcgccgtcggtcagcgtcatgtacgccttcaccccggacttgcacggttacgtgagtgcgggcaagggtttcgaaaccccgacccaggccgagtcggcgtattcaagcaccgccaacggcttcaactttgcgctcaagccgtcggtcagcaaacaactggaagtcggcctgaaagcccgtatcggccaggacacgcgcgtcaacgccgcggtgttccagatcaccaccgacgacgaactggtcgtgcagcaatccgttggcggccgcaccacttatcaaaacgccgggcgcacgttgcgccgtggctttgagttgggcatcgaaagccagctcagcgaacagtggagcaccaacctcgcctacacccgcctgcaagccacctacgacagcgactttaccaacggtgggaaaaccatcgacaagggcaactatctccccggcgttccgcaaaccacgctgttcgccgaactcaactggaagccccgcgactgggtcagcactgctctggaaggcatgtaccgcagcaaggtctacgttgaagacaccaacacccaacacgccgcgcccggctatagtgtgttcaattggcgagcccgcttcgaacagaaggtcgaacactggaccttccaccagaccctgcgcctggacaacctgctcgaccgccaatacgtcggttcggtgatcgtcggcgacagcaacttgcgctattacgaagccgcgccggggcgctcatggtatgccggagcgggggcggagtatcagttctgatcaaaggctttccaacacccgccgactggcaaaactgaaggtcaacaccgcaaaaatcagcacgcctgtcgccacctgctgccagtagaaattccagccgatcaacagcaggccgttggcgatcacgttgataaacaacacgccgagcaaggtgccgggaatattcgcccggccctgccggctcaaggtggtgccgataaataccgcgccaatcgcattgagcagaaacgcgttgccggacagcggcacgtaggcactgaccgtcgagctgagcaacacccccgccacgccgcaagccagcgccgtcgccagcgaaacgacggtgacgatgcgccgcaccgacaaccccgagtaatacgccagtaacggctgggtgccctgggcgagcagttcgcggccgaggcgcccgcgcgccaatgccaggccgtagaaaagcgccaggcccaacacaatcagcaagggcgtcaggccggtcagctcaggcttcaagccttggctgatatagatgggctggccgccatccgagagcaattgctgggcgctggtgccgataaacaacgtgcccaatgtcgccagaaacgggctgatgcgcagccctgcaatcaagcctgcattcaccacacccaccagcagcgcagcggccaatgcaccggtggccgcgagcgcccagccatgcccgccattgagcaacaccacaaagctgaaactggcgaaatccagcgccgtgcccaccgacaagtcgatgccgccagcggccaccgcgtaggtcatgccgatggcgacaatcgccagcaacacgaagttgttcaacaccaggcttttgaggttgccgccactcaaaaaaccgggcgcctgtagagcgaacaccagcacgatggccgcaaataccacaggcaatgtcagcggcagcacagcacgcagcttcatacgccagctcctttattcagtgcactggacgccgcgaccaccaacagaatcaacacaccctgcacgccgttgacccagaagctcgacacgttgagcaactgaaagccattgatcaaaaacccgatcaataacgccgccagcagcgtgcccggaatgctcgccaccagccgccttgaaaacaccacgccgagaaaagcgatggccaccactgacagcaacatgtcgccggaaccggtggtgctgccactgaaaaacgccgccgagcagagcgcggccacggcggcacaaaggcccgacagcagataactcgacagcacatagattggcacccgcaagcccgccgcctcggcagcctggggatattcgcccactgcatgcaggcgcaagccatagaccgaatgctggatcagcaaggtcagcaaacccgccgtcaccagcagtacccaggccagtgccggtacgcccagccaggccccgccgctgagcagatccagcagcggcgaatcggtgggcaccacggtattttccgtcagcaccaactccagcccggccagcacattcatgctcgccagcgtcgccaacagcggcggcaaccgcagcaccaccacggccaggccattgaccaaacccaccgccaggccgcaaccgagcgtcagcagcaaggttaaccaaagctccaggccagcattgttaaggcggctgaacacggccgcacacaaccccaaattggctgcgagtgaaaggtccagcccaccggccaccacattcgagccgccgccgatgatcacgcaggtcagcccgaaagccagtacgccgaggatcgccgattggctgaacacattggccaggttgcccactgacagaaagttcggcgccgccatggcaaaccccaacagaatcgccaggaatacgcccactgagcctcggcgcagcaccagcacccacagacgctgcgaaaaccccggcgttacgacctcaagcatgttcaacctcccgcactgacactgccgtaacgggggccgcacccgtggcgcacgccagcagttgatcgctgtcagcctcgcccgcctggaattcaccggcaatctcgccgcgatgcagcaccagaatccgatcgctgatccccagcagttccggcaggtcagacgacaacaccagcactgccgcgccctcttccaccagccgtccgatcaggcgatagatctccaccttggccccgacatccacgcccacgcagggctcatccagcaggtacaccgccgaacggcgactgagccatttgcccagggcgaccttctgctgattaccgccactgagctggctgactgctgcgtgtggcccgggggccttgatcgccaactcgtcgatcagccgcaggctttctgcctgctcccgacgccgactcaacaggccccagcgcgagaaccgcgcgagccctgccagcgtgaggttttccagcaccgacaacactggcgagaccccttgtgtgcggcgctcctccggcactaacgcaatgcccgccgcaatcgcctggccgggcgaacgcagacgcagcaaacgcccctccagatgaatactgccgctgtcggctttctcgacgccaaacagcgttttgaacaattccttggctcccgagccgaccagcccggtcaggccgacgatttccccgcgccgaaccagcaggtcaatatcccgatagcgccgcgccagactcaacccgcgcacctgcaacaaaggctcgccaggctggaccttcgccttggggtacatctcctgcacctcgcggttgaccatcagccgcgctatctcggcgctggacgtgtgccgaggcgccaccaccgccacgtcgcggccattgcgcagcaccgtgacctcatcgcacaggctgtcgatttcctgcaggtaatgggagatgtacaggatcgacagcccctcgccgcgcaagcgtttgacgatacgcaacagttggtcgacctcacgcttgaccagcgcgacgctgggctcgtcgaacaccaggattttgggtttgcggatcaacgcccgggtgatttgcagcacctggcgttcggcgctgttcagctcgctcaccaacgcaccgggaggtaattgcaggtcgaaatattccgccagcaaacgctcggcttcacgctgctgtttacgccgatccacaaacggcccacggcgcaattcatgcccgaaaaacaacgcctcgcccacggtgaaactggcgggtagcaggcgctcctgatggatgaattgcacgcccagcccatccacttggcgcggcgacagcgaagcgcaggcccggccgtcgatgcttatgttccccgcgtccgccttgtgaatgccggcgaggatcttgatcaaggtcgacttgcccgcgccgttctcgccgaccagcccgtgaatggtgccgcgctcgacctttaggctggcatcgtccagcgccacggtggcaccgaagcgcttgtgcaagtgctgcaagtgcaacgcggtcatcagtcaccccgcagttgctgaacctgcgccaggttggcggcggtggtcagcaaagtggccacgtgggtttccttgggcagatcacgctggccggccaggtaacgcgcgacgttctgcacggcggtcttgccgatcagcgccggttgctgcgccaccaccgcgcccaccggcgaatccgcctggccgagcagcgccagcacttccggcgtgccatcgacgccataggttttgatctcggtgcgcttggcgtcgatcaacgctttgctcgcgcccagttgcggaatgtcccacgccgaccagatcgcagagacgctgcctttggggtatttgttgagcagggccgagacctgggaataagcgtcctgcacggtgttgggaatcacgtcgcgcagttcgggctggatgatttccagctgcgggtggtccttgagcgcgagcttcaactggtcataacgaatcgcgcaaacgggcacgccgtaaaagccgttgaacaccagaatcttgcctttgccaccggcgtctttgatcagttgatcggccagggccttgccggtggcgacgttatcggaggtggtgttgttgaggctgtattgcgacggcgcgtcgatggtgaacagcgggatgccggcgttgctgatgcgcttgagccaggggtcgatcacgctgagggtgccgagggtctggatcaccgcgtcgggcttttgggtgacgacggtttgcagttgggtgacgaggtttttgtcgttacgcccggcgtcgagggtgatgggggtgccgcccaggcgtttgatttcatcgatctgcgcctggaaggccttgatgtcgaaatagtgactggtgccggtcatgctgaccgcgatgcgcttgccggccagggaggggacgctggcgtcgtcttcactggcggcttgggcgacctgggtcagtagcagggcggcgcccaggcagagcaggcgggaaattgaggtaagggtggatggcatgctgcggctccgctgggcgaccgatgaaagggttcagccaggggtattgcagcgcgcgtgccagaaattttattcagctaaatcaattggatagatttttcagtagtaggcggattgtcgttatcggctgccaagtgcctgatcgctgttgctcaggcaacacttgcctgtgtgggagccagcttgtgcgggaggctttgtgtgggagctggcttgcctgcgatgcagacacctcggtctctcagtgaaaccgcggtgatgccatcgcaggcaagccagctcccacacaaaagcagactggagtttagtcagtacccatcggcaaccgctgatcaatcacctgatacagcgcactcgcctgcggccaattgcgcatgaaccgcgcccggtctttggcaaacgccgcggcaaaactcgcatcagacccgtgctgacacatggcgtccagatcaatcaacgaccagcgatcccccgcccagaacaggttatggcccttgaaatcgccatggctgatccgttcgcgaatcagctgcgcaaacagctgatccagcgccgccagttcggcttccggcgcgttgccctgttcaacgtagggggcaaaccgctcgataatgtccggccccggcaagtactcggtgaccagataggcccggctgcgcagccacaaaaaccgcttctccagcaccgccagcggcttgggcgtagcaatgcccagaaacgccagccgattgccctcgcgccacgaatgccaggcccggctcggccgccagaagcgtttgagccaatgggcaaaattcttgatgttgtaacgcttgatcaccaacggccgccccgccacctcgaccttggccaccgtcgccgcgccaccggtcttgtacaggtagcctctgtccagcaaggcatccgcctgcgccaataccggcaacatggcgggctcttcttcacgacgaatcgcgcgcaagccaaaagcgccacgcaccacgctgaacagcgtgcactcgcggccaaccttgctcagaaagtccttcaaacgccaggcgctgactttgcgcacctgcttttccagggcttccagcggcaacgcgtgttcgccattgcccagcaggtaatacaccagcagttcttcggtgaacggctcaaggttcttcggcaactgggcgaaaaacaccccgaggttttccagcacccgctggcgcgacaagggtttgcccgcctcttcgacgcgaatcccggcgccgtcgatcaggtacagcttgccgtcctggcgcagcaggttgtccaggtgcaggtcttcctgccacaggcctttggtgtgcatctgggcaatcgcgcccaacgcctcggcgagcacggcagtctgttcgtcggccagcggcggcaagccttcgaccgcctgccaggcatcggcgaggctttcggcgccttcaatgaactcaaacagcagccagccgccctcaccttcctgcaagccatcggccagcagcaatggcgtggtcaggccttgctcggccaacaggcgtacacccgcaagctcacgctgaaaatgccgcgcagccttgccgcccaccaacaatttggccagcaccgggcgcccgcgccagacggccgcaccgacgtagcgttcgcccggcaacacacgcagcaggctgagcaattgcaattgcccggggcctgccgcgtccgccagctccagtgtcagcggcaggtcgggggcacgcccggcgtctttgagcgcagacaaacgcatcagcgcttctccttgtggctgcgacgggccgtcaggcgctggtaccacgcgcccaccagcgaactgtcttgcggctgctcgaggtaagccgccagcagctggcggatttgtgcatccgaccattgaggtgcccggcgcagcagcggctcaaggtccttgacccggtcacgctggccgaacagcagcgggcgggttttctccaggtcgatcaactgcgcgacataagcgtcgccgcgcgcctgcaggaaaatatgcttggggtagaagcagccatgtacctgccccacgctgtgcaggtggcgggccaacttgccgcaggccagcaggatcgcgcggtgctgctcgtccgtcagttgcggccactgctccagcagcgaatccaggtcattccagccgtcgagggcacgggtcagcagcatcgcgcgatgctcgccaccgaccttgcgctcaccgaaaaacgcagcctgcaacgcaggaataccgagcttctggtaacggctgatattgcgaaattcgcgagcgaacgtgggctcgccaaacggcttgtgcagggtgcgtgtcaggtagttgctctgacgcttgaggtaatacccctgcccttcaagctcaagacgaaacacgctgctccagccgccttggctggtattgggttcgtccaccgcgtcgagttgccgggcccacagggaatcgaacgttgcgaggccgtggcgctcaagcagagcgcggtcttcggccgccaggaaatcactcattcgcgcccctcgaaaaacttcaccacgtggcgaattcgctgtttgtccgacgccgacaggtgtgggcgttggcgatattgcaggtagaaccgcaggcgctgggtggccgacaagtgatacttggcgaccttgtccaggcaggccaggtccttggtgatccggtacttgagccagaaaccgcgccagaaatcaccgttggggcaatcgatcaggtacagggtctggtggtcgtcgaccagcaggttgcgccacttcaagtcgttgtgagtgaagcgatgctcgtgcatcgtgcgcgtgtattcggcgagctggcggctgatggcgttgacccacttggggtctttgaggcgggcatcattgcggtcggccagtaccgaaaggtcttcggttttcggcagctcgcgggtgatcatcgcgccacggtcgtaggccaggcccttgcgctccagtccccaggccaccacgtccgccgtgggaatgccccacttggcaaaacgcttgaggttctgccactcggacttcactcgcggcttgcccagataacggcgcaggcccttgccggcgcccacatagcgcttgacgtaataattgaccccgccacgctccacccgaatcacttccgacagcgggtcacgagtcagttgctcaccctgcagggcgaacaccgcctcaaggctgccaaactcatccgccagggcggcgtaagcaggttccaggttccaacccgccatcagatcgcatcccccaggcgttgcttgcgtgcgtaaagcttgtcggccttgcgctgcaacaggctcagggacgccgattgctcggccagaatctggcgcagcggctggcggaaatagcccttcaggaagcggagcttgtcgcgtcgggtcaggccgatttccagggccgagtagtacagcgctgacaggtctttgtcacgccagcgcaacggtaaatgggcacgcagctgggcgcggtgcaggtcgatcaccgacagtttgatgttgctcgcgtcaatcggttgcgcagtgtccagcagaaagtggcacaggtagcagtcgcggtggttcacgccgccccggtgcatgtcgcccaccatgcgcgccagctcgtccgtaagtgcatggcgcaacgcgggcgcaggcggctcggcgacccaattgagggtcaggtcttccaggctgatggtcggcgccagttcttcggtgatgatgaacgagtgctggtccgccgggttgctgcccttttcgccaaaggccacgccggtcatggtcggcacgccgagttcctgcaagcggtggatcgccgcccactctaggccggcgccaagtaccggcagcttggcggtaatcaggttcttgaagatttcgccccaaccgatgccccggtggattttcacgaaatacgggcggccgtcgacttcggtgcgcaaggtgcggcgcgccgccagttcacgaaacacctggccttgcagtttttcgacttcggcgaaggcgtcacgcccggcccataacgtcttgaacggttcggcaagaatcaacttcatcgttttggctccgccagaatcacatccgcagcgtgctgcggcatgctgtagaggtcggccgtctcggcgaaggccaacccgttgcggccccaggccgcgcgctgtgaggtgtcggtgagcatttgggtcagatacccgttgagctgcgcttgttcaaacggctcatccagtaccaggccgctgtcggcctctgcgatgtagtgcgcgtaaccgcacaccgccgagaccagcaccggcaacccggccaccagggcttcaagcaacaccgtgccggtgttttcgttgtacgccgggtggatcaacaggtcggcgcccaacaggaaacgcggaatatcgctacgccccttgaggaactgcacgttatcgcccaggcccagggtggcgctctgcagttggaatactttggggtcgtcctggccaattacaaacagccgcgtgcgttttttcagctcagccggcaacgcggccacggccttgaggctgcggtcgacgcccttggtcttgaagcccgagccgatttgcaccagcagcagctcgtcatcgctcaggttgaattccttgcggaacccttcgcggatttcagccgcattcggcggcgcgcggcgatccagggcgatacccggcggcaacagatggaagcgctcaagcggcgtgtcgtagtgcttgatgaacagcggttgctgcacttcggagatcatcagcacttcggtcttggcgtctttggcgaacactgcccgctcataatcggcaaagtgtttgtagcggccaaaatagcggtacagcgagtggcgcaggttttgcgccttgtcttcaaagcagccgtcggcggcgtagtacacgtccaggccgggcattttgttgaaaccaatcaggcggtccaccgggcgcttggccaggtcagcttccatccaggcgctgagcttttcattgcgcctatggttgaagaacgccttgaccggcgccaccagcacttcgaagccgggcgggacgtcgccttcccagatcagtgtgtacacacgaatttggtggccgcgcctctggcactccagggcgatgcgcatgaagtcgcgctgcaagccgccgaagggaaaatatttgtacagaacaaaagccagttgcatcagtgcagctcctcagccaataacaacgtgctcagtcggctggccacacgctcagggttcaggcgcgtgaagcacaggggcgattcgcgcttgatgtcgaaccgacgcacatcgtcggccgtcggttggtaggtacaggttttttgcaggcacggcgcgcaggggaagtcgctggccaggtgaatctggcccttgccgtaggcgccggtaaggcccgggttggtcgggccgaacagcgaaatcgtcggcacatccagcgcggctgccaagtgccccaggcccgtgtccaccgccacgcacgcgcgggcgccggccaaaacacgggcgacgccggccaggttcaacttgggtagcacctcggcgttgggcaggccttgggccaggcgttcggcgcgggctttttcggcggcattgccccacggcaacttcacgtccacacccaggcggcccatgcgctcggccaactcgcgccagtaggcttcgggccagtgcttggtgtcccaggtggtgccatgcagcagcaatacgaacggttttttcggcggcaggccgagcagtttttcgacgctcagcccgtagtcgcccaacgctttgggcaagtcataacccaaggccacggcgaacagctggcgcaaacgctccaccgcgtgttgcccacgggccacggccaggcgccgggaataaaagcgtgcggcgacaggctcgcgggccgagtctttatcaaaaccggctaccggagcgcgcacgtaacgcgtcagccaggcgcttttgagcaagccctgggcgtcgatcaccaggtcgtatttggtcgactggatgcgctgcttgaagcgccgccattcgccactcttgatggtttgccagatatttttgcgccagcggcggatggccaccgggatcaccttgtccactgccgggtgccaggtgggaatttcggcaaagccttcctccaccacccagtcaaagcgaatgccgggaatggcccgcgccgcgtcggtcagggccggcaaggcgtggatcacgtcgcccagggatgaggtcttgattaccagtacgcgcaaactatcggacctcgaccgcagtgccctgcaaccgctgcagggcttcgttcaccggctgcggcagcaactggcgcatgcagttgtagtggccgaaacggcaggtgcgctcaaaacacgggctgcaatccaggcccaggcgcaccacttcgacctggtcggccaaaggcggggtgaaacccggggaagtggagccgtacaccgccaccagcgggcgattcagcgctgccgccacgtgcatcaggccggagtcgttggacaccaccgagtcggcgcaagacagcagatcaatcgcctcggccagcgacgtatcgccgctgaggttcaccgcctcttcacgcaggccgggaatcaggcgctgacggatgtcttcgcccaccggatggtctttcttcgaaccaaacagccacacctgccagccttcgcggatcttggcctcggcgaccttggcataatgctccgacggccagcgcttggactcgccaaactcggcgccggggcacagggccagcaccgggcgatccagtgtgaggccgaacttggccagcgcggcgtcgcggctcaccgggtcaatttgcaggctggggcgcgggtacggcgtgggcaattcggcgcccggctcaaaggctagagccatgaagcgttcgatcatcagcgggtaacgcgccttgtccagcgtgcgcacgtcgttgagcaagatgtaacgaaactcgccgcgccagcccgtgcgcttggggatgccggcgaagtaaggcaccaacgcggatttgagcgagttgggcaacaggatcgcctggtcgtactggcccgccagggatttgccgatgcgccggcgggttgccagctccagcgcgccgtggccgagcggaaagctcagagccttgcgcacttcgggcatgcgctcaagaatcggccggctccactcgggggcgagcacgtcaatctggcagtctggatggcgcatacgcaggcactgaaacagtgtctgcgccatcaccatgtcaccgacccaactgggcccaacgatcagaatattcatgtagtttccacaaacgatacggggaggcttatgcctccccgcctcgataatgactgcagatcgcgctttgtgtgggagcgggcttgctcgcgaaagcatcaccgcggtctgccagacagaccgcagcgcctgcttcgcgagcaagcccgctcccacataaagccgatttccacattagattggcgtcactcaattaatcagcttaaccccagctctttccagattcgcatcacctggcgccgttcgtcggcaaactggtctccggccaccgtacccgcctcgttttgcaaggcctggcggtgggcggcggaacggtaagccttatacacctcgcgcagcaggtgagcctcggcggcgggcatcaaccccacctgctcgagcccttccaggatgcgaatattgtcggtgtagcgcagcaacgatggatgttgcgcagaccacgccaaagccgcgtattgcaccataaattcaatatcgacgatacctccggcgtcctgcttgaggtcgaacgccgccgtgggttcgaaggcattggtgccggttccggctgctgtggacttggtgcccaggttgtcacgcatcttggcgcgcatctcgctgacctcctggcgcagcttcgccaggtcgcgttcctgccccaacactttggcccgtacctgctcgaacgcctggcccacatcctggctgcccaccagcacccgcgcgcggatcagggcctgatgttcccaggtccaggcttcattttgttgatagcgctcaaacgcaccgagcgaactcaccagcaggccggaagcgcccgatggccgcaagcgcatgtccacttcatagagctggcccgagttggtctgggtggtcagcaggtgaatgatgcgctggcccaggcgggtaaagaactgcgcgccgtcgatgggcttggcaccgtcggtttcagcctgcgggtcaccgtcgtgaatgaacaccagatccaggtcggaaccatgccccagttcgatgccgccgaccttgccgtaaccgacaatgatgaagccggggtcgcacagcgtgccgtccacccgttgcggcgagccatggcgcgccacggtttggcgccacgccagagccagcacttgttcgaggatggcttcggcaagccaggtcaggtagtcgctgactttcatcagcgccaggctgccggcgatttccgacgccgccacgcgcaggcgatgggccagcttgaagtggcgcagggcctccatctgttgctcaaggtcgtcttcggggatacgcgtcaggcgttcacgcagttcggcagcgagttctggcgccagcggtggcttgaacaagcggccttcgttgagcaattcgtcgagcaacagcgggaaacgggtgatctgttcggcaatccacgggctggcggcgcacaaggtcaacaagcgacgcaaggcgtcagggttttccgtgagcagcaccagataagcggagcgccgggcgacggcttccaccaacggcagcacgcgctccagcaccagatccgggttggcgtgctccacggcctgggccagcaggcgcgggataaacgcatccagacgctcacgtcccaggcgctgcatggcgcgcaactgcgggctaccgcgcaggctggccagggctttgagtgccttgggcgcgtcggtgaaaccgccttcagccaattgccggcaggcggcgtcttcgtcttgggactcttcccacaacggcaaccattcaccgcctacaactaactcgctctcttcgccttcctcctcatcggggtcagcgatgacttggcggaagtgccaatcgacgcggccacgccagtacatcaggcgttcatggaacgcagcccaatcggtgaaacccaacataaaagctatgcgcgcctgatcttcagggctatcggggagcatttgcgtctgccggtcggcaatcgcctggatcgcgtgctcggtgtagcgcaggaactcgtacccgttacgcagttccgcgatcaccgctggcggcagatagccttggccttccagagtacccagcactttgagcagggggcgctgttgcaggctgaggtcgcgcccgccgtggatcagctggaacgcctgggcaataaactccacctcgcgaataccacctgagcccagcttgatgttctcggccatgcccttgcgccgcacttcctgctgaatcagctgcttcatggtgcgcagcgcttcgatggcggaaaagtccaggtaacgccggtagacgaacggccgcagcatgtcgagcagctgcgcgccggccacctggtcaccggccactacccgcgccttgatcatggcgtagcgttcccagtcgcgaccctggtcctggtagtactgctccagcgcgttgaagctgagcactaacgcgccggccgagccgtaagggcgcaggcgcatgtcgacacggaacacgaagccgtcgacggtcatcgggtcgagggccttgatcagtttttgaccaagccggatgaaaaactcctggttatccagggcgcgtttgacgcccaccgtctcgccgccttcggggtaggcgaagatcaggtcgatgtcggacgacaggttcagctccaccgcgccgagcttgcccatgccgaggatgaccatgtgctgggcttcgccgctgcgccgaccggttggcgtaccgaactgcacgcagtggcgctgatacagccattgataagcctggtcgatgctggcgtcggccatgtcggagagatcacggcaggtttgcaccaggtcggcctggcgggtgaggtcgcgccagatgatgcgcacttgctggcgcgtgcgctggcggcgcaaaacgcggcccagctcatcttctgtttcggcctgttgcacggcacccgcgatctggctgcacagctcgccaggcgcaaagccacggtccagctcgccccaggccaccagttcgagcaacatcaaagggtcacgaacgctctgttcaatgacaaaatcactggcggcgcacacgcgggagaagtcagcccaccgttgcggcgtccactcggaaagtccatgatcgtcgtccagcgcggccactgcgtcacgaaatgactgctcggcccgctgggcaaaaggcaagagaatggccggtaattcggccagcgttggaaggctcatggtctatccttgatcggcgcgtaaagggcgtgttgccgtgaaggcaagaaccacgcttggtgaaggactgtcgaacaaaggttagaaatagctgaaattaatttcattttggcagccaacatcaaactttcaccttttcttgttcgcaaaagatcaacaataacgattatgctcaccagccagaccgagtcatacgctcagtcttgtgtagttttactactcgtatatacattcgaaaggctgaaatggccgacgatttgtagtaaaactacaggacgccgaagcaaccttcggccatccaagaatttatgtcgtctgcccacaaggccagtcgcaaacttcaggcaaccgattctggtagcctttccgccctggagcaagccatgcaagacctcgatcccgtcgaaacccaggaatggctggacgccctggaatcggttctcgacaaagaaggcgaagaccgtgctcactacctgatgacccgtatgggcgaacttgcgacccgcagcggctcgcagttgccttacgccatcactacgccataccgcaacaccatccctgttacccacgaagcacgcatgcctggcgacctgttcatggaacgccgcattcgctcgctggtacgctggaacgccatggcgatggtaatgcgcacgaacttgaaagattcggacctgggcggtcacatctccagcttcgcttccagcgcaaccctgtatgacatcggcttcaactacttcttccaggccccgaccgacgaacacggcggcgacctgatctacttccagggccacacctccccaggcgtttacgcccgtgcgttcatggaaggccgcatcaccgaagaacacatgaacaacttccgccaggaagtggacggtaacggcctgtcgtcgtacccgcacccttggctgatgcctgacttctggcagttcccgactgtgtccatgggcttgggcccgatccaggcgatctaccaggctcgcttcatgaagtacctggaagcccgtggcttcatccctgaaggcaagcagaaagtctggtgcttcctgggcgacggcgagtgcgacgagccggaatccctgggcgccatctccctggccggccgcgagaagctggacaacctgatcttcgtcatcaactgcaacctgcagcgcctcgacggcccggttcgcggcaacggcaagatcatccaggaactcgaaggcgtgttccgtggtgctcagtggaacgtgaccaaagtcatctggggccgtttctgggacccactgctggccaaggacgtcgacggtatcctgcaacgtcgcatggacgaagtcatcgacggcgagtaccagaactacaaagccaaagacggcgcgttcgtacgcgaacacttcttcaacacgcctgaactcaaggcgatggttgcagacctgtccgacgacgagatctggaaactcaaccgtggcggccacgacccgtacaaggtctacgcggcgtaccacgaagcggtgaaccacaaagaacaaccaaccgtcatcctggccaagaccatcaagggttatggcaccggcgccggcgaagcgaagaacactgcgcacaacaccaagaaagtcgatgtcgacagcctgaagttgttccgtgaccgcttcgacatcccggtcaaggacgaagagctggagaacctgccgttcttcaagcctgagccgaacagcgccgaagcccgttacctggccgagcgccgcgccgcactgggtggtttcgtgccacagcgccgcgccaacagcttcagcgtaccgacgccggacctgagcaccctcaaggccatcctcgacggctcgggcgaccgtgaaatttccaccaccatggctttcgtgcgcatcctggcgcagctggtcaaggacaaggacatcggcccgcgcatcgtgccgatcatcccggacgaagcccgtaccttcggtatggaaggcatgttccgtcagttgggcatctactcctccgtcggccagctctacgagccagtcgataaagaccaggtgatgttctacaaggaagacaagaagggccagatcctcgaagaaggcatcaacgaagcgggcgccatgagctccttcatcgctgccggtacttcgtactccagccacaaccagccgatgctgccgttctacatcttctactcgatgttcggtttccagcgtattggcgacctggcgtgggcagcaggcgacagccgtacccgtggcttcctgatcggcggcaccgccggccgtaccacgctgaacggcgaaggcctgcaacacgaagacggtcacagccacatcctggctgccaccatcccgaactgccgcacctttgatccaacctacggctatgagctggcggtgatcatccaggacggcatgaagaagatgaccgaagagcagcaggacgttttctactacatcaccgtgatgaacgagtcctaccagcagcctgcaatgccggctggcgtggaagaaggcatcatcaagggcatgtacctgctcgaagaagacaccaaggaagcagcgcaccacgtacagctgatgggctccggcaccatcctgcgcgaagtgcgtgaagcggcgaagatcctgcgtgaagagttcaacgtcggcgctgacgtgtggagcgttaccagcttcaacgaactgcgtcgcgatggtctggccgtagagcgccacaaccgcctgcaccctggccagaagccacagctcaccttcgttgaagagtgcctgaatggccgtaaaggtccggtgatcgcatcgaccgactacatgaaactgtttgctgaacaaattcgccagtgggtcccgtccaaggaattcaaagtcctgggcaccgacggtttcggccgcagtgacagccgcaagaagctgcgtcacttcttcgaagttgaccgtcacttcgtggtgttggcagccctggaagccttggctgaccgtggtgagatcgaacccaaggtagtggctgacgctatcgtgaagttcgggatcaacccggaaaaacgcaacccactggactgctgaggagattttttgtgagcgaactcattcgcgtacctgacatcggcagcggtgaaggtgaagtaatcgagctgtttgtgaaggtcggcgacacagtcgaagccgaccagagcatcctgaccctggagtcggacaaggcgagcatggaaatccctgctcccaaggccggcgtggtcaagagcctgaaagtgaagctgggcgaccgcctgaaagaaggcgacgaactgctggagctggaaatcgaaggtgccgctgatgcggcccctgcggcggcgcctgctgccgccgccgcacccgcgcctgctgaaaagcctgctgctgccgaggcccctgcggccccggctgctgctccggccgcagcctccgttcaggacattcacgtcccggacatcggttcgtcgggcaaggccaagatcatcgagctgctggtcaaggtcggcgacaccgtcgaagccgaccagtcgctgatcaccctggagtccgacaaggcctccatggaaatcccttcgccggctgccggcgtcgtggaaagcatcgcagtcaagctggaagacgaagtcggcactggcgacttcatcctcaagctcaaagtacaaggcgctgcaccggctgctgccccagcaccggccgccgcgcctgctgccaaggctgaagctgcaccggctgccgcggctcctgcgcctgctgcaaaagccgaggccgcaccggcccctgcggctgcaccagcgccaagcggtgccaaggttcatgccggcccagccgtgcgtcagctggctcgtgagttcggcgttgagctgagcgccgtcgcggccagcggccctcacggccgcgtgctgaaggaagacgtgcaggtttacgtcaaagccatgatgcagaaagccaaggaagcgccggctgctggcggcgctaccggtggttcgggcattccgccgatccgcaccgtcgatttcagccgcttcggcgaaatcgaagaagtgccgatgacccgcctgatgcaaatcggcgcggccggcctgcacgccagctggctgaacatcccgcacgtgacccagttcgaccaggccgacatcaccgacctggaagctttccgcgttgcgcagaaagccgtggccgaaaaagccggcgtgaaactgaccgtgctgccactgctgctcaaggcctgtgcacacctgctcaaggagctgccggacttcaacgcttcgctggcgccaagcggcaaggcgatcatccgcaagaagtacgtgcacatcggctttgccgtcgacaccccggatggcctgctggtaccggtcatcaagaacgtcgaccagaagagcctgctgcaacttgccgctgaagccgctgcactggctgccaaggcccgcgacaagaagctcaccccggacgacatgcagggcgcttgcttcaccatttccagcctcggtcacattggcggcactggcttcacgccaatcgtcaacgcgccggaagtggcgatcctgggtgtttccaaggcaaccatccagcctgtgtgggacggtaaagcgttccagccgaaactgatgctgccactgtcgctgtcctacgatcaccgcgtgatcaacggcgctgctgcggctcgcttcacccagcgcctgagccagttgctgaacgacatccgcaccatcctgctgtaagcctctacgggcctccccttcaccggggaggcctggctacaccgatttccgagcgccacgctcgtacctcaaccccgctctggcggggcttttttttgggcgtttgttggacatcggaaatggcgttgtacaccacccatcaccccgattgcagaaatccctcgcgcggccgataacacacatatagcacttagccttcatcctctcttgtcagtacgtgctgcatgatgcaaccttgccgcaggcgacagtaaagagggcgtgagcccggcgccgtgcgcgtcttcccaagcgagtttcccccatgaaaagccaacccgatgtcgcccgaatggcggccgaggtagtgacgcaattaccggtgccttcgcgcctcggtatgctgcgtttcgagcggcttaatgaggcaagctgggccttgctgtacctcgaccccaattgtgaacgccaattcggcctgccggcggttgaattgtgtgcgttgcttggcaccccctacgccagcctgatggagccccaggcgcgctatcagctacacgacgccatccagcagcaactggcccagagcccgcactatctggtgcgctacaccctgcacaccaatgatggcccgctgagcctgctggaaatgggcgaggcctacaaacaacacaatcgccacctgcttcgcggctacctgatggtcgtcgacgggctgttcagcgaaatccccacgacggccccgaccgccgatctggaaaaccagaacagccgcctgcagatcgccctggagctcaaccagcgcgcccagcaagaacaactgcaacaccttgagcgggtacgcgcccaacaagagctgatcctgctgctggcgcgccagcgctacaccacgcccaattctctgctggaagctgccgagctgatcacacgcagcgcctgcgacatctaccagatcgattgcgcaagcatctggaacctcgaaggccagcgcctggtgccgatctcggcgtaccaccgcgccgaccaacagcaccacttgcccgaagccatcgacgccagcagcttccccgattacctggaagccttgcactccagccgcgccatcgacgccacccacgcgatgcgcgacccgcgcacccgtgaaatggccgaaagcctgcgcgccaaggacgtgcacgcgatgctcgacgccagcatccgcgtggatggccaggtcgtcggtgtgctgtgccttgaacagggcggcagctcgcgcgcgtggcaatccgacgagatcgcctttgccggcgagctggcggaccagttcgcacaagtcatcaacaatcacaaccgccgcaccgccaccagcgccctgcacctgttccagcgcgccgtagagcagagcgccaacgcgtttttgctggtcaattgcgacggtgtggtggagtacgtcaacccaagcttcaccgcgatcacccaatacagcgccgaggaagtccacggccaccgcctggcacagctgccggcgttggagaacctcagcgagctgctgttcgacgcgccgtcctcactggctaaaagcaacagttggcagggcgagttcaagagccggcgcaagaacctggagccctactggggccagctgtcgatttccaaggtgtatggcgacaaccgtgagttgacccactacatcggcatctacgaagacatcacccagaccaagctcgcgcaacagcgcatcgaacgcctggcctacaccgacaacctgaccaatttgggcaaccgcccggcgtttatccgcaacctcgatgaacgcttcgcccgtgacagcgacagcccgatcagcctgctgctggtggacatcgacaacttcaagcgtatcaacgacagcctcggccaccagaccggcgacaaactgctgatcagcctggcccggcgcctgcgcaacagcctgagcgccggcggcagcctggcgcggtttgccagtaacgagttcgcggtgctgctggatgacacggaccttgagacgggccagcaagtcgccagccagttgctgaccaccctcgacaagccgatgttcgtcgacaaccaattgatcagcgtcaccggctccgtgggcctggcctgcgcgccgctgcatggccgcgacccgcaaaccctgatgcgcaacgcaggccttgccttacataaagccaaagccaacggcaaacatcaggtgcaagtgtttaccgaagcgctgaacgccgaagccagttacaaactgttcgtggaaaacaacctgcgccgcgccctgacccagaacgagctggacgtgttctaccagcccaagctgtgcctgcgcagcggccgtttgctgggcatggaagcgctgctgcgctggaaccacccggaaaaaggcatgatccgtcccgaccagttcatcagcgtcgctgaagaaaccgggctgatcatacccatcggcaaatggatcgcgcgccaggcctgccgcatgagcaagcagttgagcgccaatggcatgggcaacctgcaggtggcgatcaacctgtcgcccaagcagttttccgacccggacctggtggcctccatcgccaccatcctcaaggaagaacaactgccggccaacctgctggagctggaattgaccgaaggcctgctgctggaagccaccgaagacacgcgccagcaactcgaccagttgaaaagcttcggcttgaccctggccatggacgacttcggcaccggctattcgtcgctgagttacctgaaaaaattccccatcgacatcatcaagatcgaccgcagttttatccacgaaatcccggacaaccaggacgacatggaaatcacctcggcggtgatcgccatggcccacaaccttaagctcaaggtggtggccgaaggcatcgagacagccgaacagttggcgttcctgcgccggcatcgctgcgacgtcggccagggctacttgttcgaccggccgattcccggcgcagagctgctggagaagcttaaacgctatccacgcgggccaatcgcctgacagcgctgtaacactcgggcacactggctgtctgactcattacttacccaactcaatctgactgagaggactgatcatggtcttgcgctcggaaattctggtgaacaaaaacgtgttgcctactcaagaacaagctttgcctggccgtgaaaccccgatgaacctgccggaaacgcatttcgtcaacggcaaccccctgctgggcccgttcctggacgacgttggctttgcgattttcggcctcggttgcttctggggtgccgagcgccggttctggcagcgcgacggcgtggtcagcaccgtggtcggttacgccggtggctacacgccaaacccgacatacgaagaagtctgctcgggcctgaccggccacagcgaagtggtgctggtggtgtacgaccaggccaaagtgaaatacgaagacctgctgaagatgttctgggaactgcacaacccgacccagggcatgcgccagggcaatgacatcggtagccagtaccgttcggtgatctacgcgaccacgccggaacaactcgcggcagcgcaggcgagtgccgaggcgtatcaggatgaattgaccaaggcgggtttgggtgtgatcaccaccgaaatcgaagaggcaccgacggtgtacttcgccgaggcgtatcaccagcagtatctggcgaagaacccgcaggggtattgcgggatcggcggtacgggtgtgacctgcccgatatagagccaaaagcatcgcgggcaagcccgctcccaccttgatacgcgatcaactgtgggagcgggcttgcccgcgatagcgtactgacaggcaactatttactcggcaatcaaccaatccatctgccacccaccctgggtctggcccagctgcttggacagccacggcagcagctcacgcaactcttcctccaaaccccacggcgggttggcgattgccaggcccgaacccgtcagggtgtttggggtgtccagcggatgcaccagcaactccacacgcagcagcttcggcgcgccagtgccggccaggtcctgatagaaacgacgcagcatgcgctggtccttcaccgggtaccagatcgccgctacagtctgacgcatacggctgactgcttccttgagggacgccgcgcagcgctgcatttcatcaagtttttcaaacggcgggtcgatcagcatcagcgcgcgtttttccggcaccggcagcaaagcgcgcggcacatgccagccttcacccaggtggactttgacccggcgatcacccttcatgttgtccttgagcaatacgccgtcttccgggtgtttctcgttgagcagcacacggtcctggggccgcgtcaggcggcgcgccagctccggcgaacccgggtaatagcgcaactggccatccgggttcatctcgtgcagcacgcgcatgtagtcggcggtcagcggcggcaggtcgctctggccccacaggcgcgcgatgccttccaggtattcaccggtgcggttggcctggtcgccctgcaggtcgtacaagccgatgcctgcgtgggtgtcgaggtaggcgaacggctgctccttgcgcgacatcagggcgatgaggcgggtcaaggtcaggtgtttgaagacatcggcatggttgccggcgtgaaaggcgtgacgataattcatggttgctcctgcgcagggggcgaagtttacctgctacgcgggcaaaggtgcagggctgcatgtcgggcggagcccatgccgtcgatacagcccctgagttcagctcaattccacagccaggtaattggccagtgcttcatgactgacattcgaggtgcgtgcgaaataagcgaccttgtgctgcaaggtggttggcgtgaaggctgtgtacaagtcggggcgctgttcttcgagccattgcagcaagttgtcgatcagggtttgcggtgactgctcggccaaatgcgccagtaacggcgcagggactcgccaccatgggctggttttggcagccgtaaccgcgccggtcgccaccgacagcgactggccattgatcaggtaacgctggaacaccggcaacacctttcccgcctcatcgcccagcgctcgcaacaccggcaaaaactgcgcgccatcccaaaaacgcaaaaacacctgctggtcatccggcaaatacaccttggtcaggctttgcaggtgtgccaccacggtttccactgggctcgacgataccgccaaccagccccagcctgtcgactcggtcgctgctatccaatcgaggaaggggctgtcgggttcgatgataccgacatagggcatcacttcactccactcggcataagccgtgccggcccagagtgatcgagggagcgcctcggccgccgaggattgccacgcaaccagcggcttggcatcactggagctccccagcactgcgaagagttgctcgccgggacgcagaggggtttgagtcagccacgcagtgggtgtcatgggttgagacatgggagcaaattccttttaaggctcgtgggtgattttgggatcatgcgacgtcgcactgcccattcctgcatcgctcacactcttcacaaaacggcgcacttcgcctcaggctcgccacttgcaccgggcttagcggtgcaggtagtaccgccaacagtttttccttgattccaggtgtcaacggtgaagccgccggagcaggcgcaccgccaatctggatcggaacgctgctgaaaatcccacccgctgaaagcgtgatcgactgcccgcccgcctgaatcgtgacggtggcgcctgcatcgattaccacgctttgccccgcgccaatctggatggtccgcccagcgcgcatttgctgcgaaccaccaaccaccagatgatcatcctgcttcagctcagtcaggcggttgccatgggtgatgcgctgctcttcacccaacagctcatggtgcgactcacctccgacgctcacccggcgcacgttatcgacccgtacctgctggtcatgcagcacatgctgggtccagtcgcgctgggcgcgcaggtagatttcttcggcgcccttgcggtcttcgatgcgcagctcgttgtagccaccaccacccgggctgctttggctgcggaaaatgctgcgggtcatgtcggctggcaagtcgagtggcaccggggtcgctgcgttgggcaggcagcccaccaccagaggcatgtccaagtcgccattgacgaaccccaccagcacttccatgccgacccgtggaatcagcaccgcaccataacggtcatgagcccagccgctggcaacgcgcagccagcagctggagtgatcgtcgtgcttgccgttgcggtcccaggccatttgcactttgacccggccgtattcgtcgcaatggatttcgctgttggcagggccggtgactatcgcgttctgatagcccgagatagttgggcgcggccgctcaggcagtggcgggcgaaagatcacatcccacggggcggcgacaaacgtgttgctgtagccctggcgaaagtctgcgcctgagacttcggtgacggcctcctccagtacttgaggttgcttgccttcgtgggtgacttctgtcaccagccacaagtcattccagtcctcacgcgaatgcccgctgagcttgaggaaccggccagtgaagagtgccggctcgtcgccctcgccatgagcaatccgatactcactgcggtggcgctccaacccccgctgcgcgaggtatttgccgtggggccgatcactgaaatggccgggataatcctgcgcctcaagcttgggaagctgctcgccagccaccgcactttcgagcccgagacgcggcttgcgaaaatcgtaatcgcgcaggttcaccgccgtggtgcgggcttgcacttgcacggcaaaacgctttatcgccggattatccgccaccattccagagcctggggtgtaaggcgtgggctggtcaggctgggcaaatacggtctggtcatcgccaaacaccagcaggtggccgtcgggtgaatgctggaagtggtagtgaatgcccagctcggcacacagccgctgaatgaacgccagatcagtctcaccgaactgcacgcaatactcgcgaacgggataactaccactcaggcgaaacgcgaaacagtcactctgaatcccctgccctaccagtacctgcgccacaatttgcggcacggtcttgtgctggaaaatcctttggtggctgctgtgagccagataagccaactgcggcacaacgctgatttgatagcgcgtcaaacgccgcccggagtcgccctgtgccacccggcagaccaggccatgcacgccgcggccctgatcatcgaaaccgagatgcacctgtcgatgcagcagactctccaggtcaaggtcgggatgctcactgaccagctccaggtcaaagcgatagggctgactgatggtttcggtgcccttgaactcgaaaaccttgagttcactgggctctccgtcgagggtcagggtaaacgcactgtgattggcaggagcgaacatccggtgtttctctgcgaagggtgggcggtcgattctgcaccagctttttgccctcctgagccccctctgcgcaaatcagtaagctcctacacaaccgactccgaattcttcatctatccggcgtcaaagacgccccgcagccgtgctagcgtatttgccccttcctcgccggatcactggaaaaagcatgaccagccgctacgcaaaaatcgccctgacgctctcactcgccgctttcgcctgtttggtcgcgttcaacaacatcacggactacggctccaacttcgccttcgtcaaacacgtgttgagcatggacaccaccttcccgggcaacgccgccatgtaccgcgccatcaccacgccgtggttgtggcatgccgcctacgcgctgatcatctttggcgaagcactcaccggcttgctgctggcgctgggcgcattgaagctgtggcgcgcgcggcacgccggcagcgccgatttcaaccgcgccaaggcctgcgccaccctcggtctcgcccttggcttcgtggtgtggttttttggctttatggtggtgggcggcgaatggttcctgatgtggcaatcccatcagtggaacggccaggatgccgcgttcaagttctacatggcgattgtgggtgtgctgatcttcttgaacctgccggattctgactgaatcaggccacaaaaaaaggcccgccatccgtaggacgcgggcctttttttcaactcaacgagtgctcagcacccgaagaagttacttgttgaggttgtagtctttttccgccgcatcaaaacgctcaaccataccagcggtcggtgcgcccagcttgctcacgaagtagatcgcaaggctggcgaagatgaagcccggaatgatttcgtacaggcccaacaggctgaagtgcttccacacgatcacagtgatcgcgccgaccaggataccggccagggcgccgttgcgggtcatgcctttccacatcaccgagatcagcaccactgggccgaaggctgcgccgaaaccggcccaggcatagctcaccaggccgagcacgcggttgtccgggttggccgccatggcgatagcgatcaaggcaaccaccagcaccattgcgcggccgacccacaccagctcaagctgggaggcgtttttgcgcaggaaggttttgtagaagtcttcggtcagggcgctggagcacaccagcagttggcagctcagggtgctcatcacggcagcaagaatggccgacagcagcacaccggcaatccatgggttgaacagcagtttggccagctcgatgaacacacgctcgtggttctcggtgacagggccagccacttccgggtgcgccgagaagtaggcaataccgaagaagcctaccgccacggtgccgcccaggcacaggatcatccaggtcatggagatacgacgcgcattggcaatcgacttcaccgagtccgccgccatgaaacgcgcgaggatgtgcggttggccgaagtaacccaagccccagcccatcagcgaaatgatgccgatgaaggtggtgtttttcagcatgttgaagttgtcggggttcttggcttcgatggccaggaaggtagtgtcaacaccaccggtggccagcaacacgatgatcggcgtaaggatcagcgcgaagatcatcagcgtggcttgtacggtatccgtccagctcacggccagaaaaccgccgacgaaggtgtaggcaatggtcgctgcagcgccggcccacagcgcagtctcgtaagacatgccgaaggtgctttcaaacaggcgggcaccggcgacgatgccggaagcgcaataaatggtgaagaacaccaggatcaccaccgcagagatgatccgcagcaggccgcttttatcttcgaagcggctggagaagtaatccggcagggtcagggcgtcgccattgtgctcggtctgcacccgcaggcggccggccacgaacaaccagttcaggtaagcgccgacgatcaggccgatggcgatccagctttccgacaggcccgacatgtagatcgcgcccggcaaccccatcagcaaccagccgctcatgtcggaagcaccggccgacagagccgtcaccacgctaccgaggctgcgaccgcccaggatgtaatcggaaaggttgttggtggagcgataggccatgaagccgatcagcaccattgctgcgatgtagatcacaaacgtgatcagggttggattacttacgctcataagagtgacgccctggctttgtttttatgtagcgacggtctgtcagacggccacccattgctaaccgggtagacgaaactgcgtgccgcgcatttatgactggcgtttccccaggaaagccgccagccgatgaaccgaaccgctgtggtggttgcaccttggacgtgaatgctattcaacaaagcaaataaggtgcaaccagtttcttgagaataagttgcacctaggtgtatttcaggcaaaacgtcggttttttgctccttttcggagcaagcgcggcgaatttcagaacctgttgcaccgttatgtgaccgatttggccagaccgatcatttcgcctgatcaccatcaaaaaattcatggataaaaaaggttgcacccggttgcacctctttctgcgcgaagctaatcttgccgccagcagatgccactcggtagtggcacccatgaggataaaaagatggcaacgaccacccttggggtcaaactcgacgacccgacccgcgaacgcctgaaggccgccgcgacctccattgatcgcacgccacactggctgatcaagcaggcgattttcaattacctggagaaactggaggggggtgcaaccctgaccgagctcaacggcttgagcaccaaggacgctgaagacgcaggcgaggtcccgaatgaccacgcccaccagtgcttcctggagttcgccgagagcatcctgccgcaatccgtattgcgcgcttcgatcaccgccgcttaccgccgtccggagccggaagtggtgccgatgctgatcgagcaggcgcgcctgcctgccgcaatggccgaagcgacagacaagctcgcctcttcaatcgccgagaagctgcgcaatcagaaaagcgccggcggccgtgcaggcatcgttcagggtttgttgcaggaattctccctatcgtctcaggaaggcgtagcgctgatgtgcctggccgaagcgctgctgcgcatcccggacaaaggcacccgtgacgcactgatccgcgacaagatcagcaccggcaactggcagccgcacctgggcaacagcccgtcgctgttcgtcaacgccgccacctggggcctgctgctgaccggcaaactggtcgccacccataacgaaaccggcctgacctcgtccctgagccgcatcatcggcaaaagcggcgagccgatgatccgcaagggcgtcgacatggccatgcgcctgatgggcgagcagttcgtcaccggcgaaaccatcgcagaagccctggcgaacgcgagcaaattcgaagccaagggcttccgttattcctacgacatgctcggtgaagccgcactgaccgaacacgacgcccagaagtacctggcctcgtacgaacaagccattcactccatcggcaaagcctctcacggccgtgggatttatgaaggcccgggcatctccatcaagctctccgcattgcacccgcgctacagccgtgcgcagtacgagcgcgtgatggatgagttgtacccgcgcctgctgtccctgacgctgctggccaagcaatacgacatcggcttgaacatcgacgccgaagaagccgaccgcctggagctgtcgctcgacctgctggaacgcctgtgcttcgagccgcaactgaccggctggaacggcatcggtttcgtgatccaggcgtaccagaagcgttgcccgtatgtgatcgactacgtcatcgatctggcgcgccgcagccgccaccgcctgatgatccgcctggtcaaaggcgcttactgggacagcgaaatcaagcgcgcccaggtcgaaggcctggaaggctatccggtctacacccgcaaggtgtacaccgacgtttcctacattgcctgcgcacgcaaactgctgtcggtgccggaagttatttacccgcaattcgccacgcacaacgcccacaccttgtcggcgatttaccatatcgccggtcagaactattaccccggccagtacgagttccaatgcctgcacggcatgggcgaacccctgtacgagcaggttgtaggcaaggtctccgaaggcaagttgaaccgtccgtgccgcgtgtacgctccggtcggtactcacgaaacactgttggcctacctggtgcgtcgcttgctggaaaacggcgcgaacacctcgttcgtcaaccgcattgccgaccaatccatctcgattcaggagttggtggccgacccggtggccagcatcgagcagatggctacgctggaaggcggcttcggcctgccacacccacgtatccctttgccgcgtgacctgtatggcagcgaccgcgccaattcggcgggcatcgacctggccaacgaacaccgcttggcgtcgctgtcctgcgccctgctggccaccgcgcacaacaactggaaagccgcgccgatgctcggttgcgcctccagcaatgaagccgcttcaccggtactgaacccgtccgacctgcgtgacgtggtcggccacgtgcaagaggccaccgtcgccgacgtcgacaacgccatccagtgcgccattagctccggcccgatctggcaggccaccccgcccgccgagcgcgccgcgatcctggagcgcgccgccgatttgatggaaggcgagatccagccgctgatgggcctgctggcccgcgaagccggcaagaccttcgccaacgccatcgccgaagtgcgtgaagccgtggacttcctgcgctactacgcggtgcaggcacgcaacgatttcaccaacgatgcccaccgcccgttgggcccggtggtctgcatcagcccctggaacttcccgctggcgattttcagcggccaggtcgctgctgccttggcagcgggcaacccggtattggccaagcccgccgagcaaaccccgctggtcgccgcccaagccgtgcgcatcctgttggaagccggcattccggaaggcgtgctgcaattgctgccaggccagggtgaaaccgtgggcgcgcgcctggtcggcgatgatcgcgtcaaaggcgtgatgttcaccggttccaccgaagtcgcgcgcctgctgcaacgcaacgtcgccggccgcctggatgcccagggccgtccgatcccgctgatcgccgaaaccggtggccagaacgcaatgatcgtcgactcttcggcactgaccgaacaagtggtgatcgacgtggtgtcctcagccttcgacagcgccggccaacgttgctcggccctgcgcgtgctgtgcttgcaggaagattcggcagaccgtgtcatcgaaatgctcaagggcgccatggcggaatgtcgcctcggcaacccggaacgtttgtcggtagacatcggccctgtgatcgacgccgaagccaaggccggcatcgagaaacacatccagaccatgcgcgacaaaggccgcagcgtataccaggtggcaattgccgacggcgaagaaatcaagcgcggcaccttcgtgatgcctaccctgatcgaactggaaagcttcgacgaactgcaacgggagatcttcggcccggtgctgcacgtggtgcgctacaagcgcaaagagatcgaccaactgattgcgcagatcaatgcttcgggctacggcctgaccctgggcgtgcacacccgcatcgacgagaccatcgccaaggtgatcgacaacgtcaatgccggcaacgtctacgtgaaccgcaacatcgtcggcgctgtggtcggcgtgcagccgttcggcggcgaaggcctgtcgggcactggtccgaaggcgggtggcccgttgtacttgtatcgcctgctgtcgactcgccctacggatgcaatcgaacaatccttcgttcgtggcgacgcactcgccgcaccggacgtgcgcctgcgcgataccatgagccaaccgctgaccgccctgaaaaactgggccgacagcaacacgttcagcgacctgagcgccctgtgcagcaggttcgccacgcaatcgcaaagcggtatcacccgccaactggctggcccgaccggcgagcgcaacagctatgcaatcctgccacgcgagcacgtgctgtgcctggctgaagtggaaggtgatttgctgactcagttggcggcggtattggccgtgggtggttcggcggtgtggccggaaacagacctgaccaaagccttgttcccacgcttgccgaaagagattcaggcgaagatcaagcgtgtggctgactggaccaaggacgaggtggtgtttgacgcggttctgcaccacggcgattccgatcaattgcgtgcggtgtgccagcaagtggcgcaacgtggcggggcgattgtcggggtgcatggtttgtcgcagggtgagacggcgattgcgctggagcgcctggtgattgagcgggcgttgagtgttaacaccgcggcggcaggcggcaacgccagcctgatgaccatcggctaactgacccaacccggtaaaacatgtgggagctggcttgcctgcgatagggcaatgccagccgacattttaattgctgacccaccgctatcgcaggcaagccagctcccacattgactgcatccacaccatcctccctgcgttttgcacttgcatcacgcaaatcaatcttcgtatccagcctctatttgcgcacttagactccggcctatccccacacaggtaagccgccatgtccgagacgctgctcagttcccgcaatctggctttcgagctgtacgaagtcctcgatgccgagggcctgacccagcgcgagcggtttgccgaacacaaccgcgaaaccttcgacgccgcgatcagcaccgcgcgcagcatcgcagaaaagtacttcgcaccgcataaccgcaaaaacgacgaaaacgaaccgcgcttcgaggacggcaaggcggttctgatcccggaagtaaaacccgccgtggatgccttcctcgaagccggtttcctcaacgccgcccgcagcttcgaagccggtggcatgcagctcccgaccctgctgtcccaggcctgcttcgcacacttccagtccgcaaacgctgcctcaacgtcctatcctttcctgaccatgggcgctgccaacctgatcgaaagcttcggcaccgaggagcaaaaacaacgcttcctgcaaccgatgatcgacggtcgcttcttcggcaccatggccctgaccgaacctcacgcgggctcatcattgtcggatattcgtacgcgcgcagaacctgcggctgacggtacttatcgcctcaagggcaacaagatcttcatctccggcggcgaccacccgctgtcggaaaacatcgtgcacatggtgctggccaaactgccggacgctccgcccggggtgaagggcatttcgctgtttatcgtgcccaaattcctggtcaacgatgacggcagcctgggcgagcgcaacgacgtgctgctggcgggtctgtttcataagatgggctggcgcggcaccacgtccacagcccttaatttcggtgataacggtaactgtgtcggctatctggtcggtaaaccgcaccagggcctgagctgcatgttccagatgatgaacgaggcgcgcattggcgtcggcatgggcgcggtgatgctcggttacgccggctacctgtactcgctggagtacgcccgcgaacgcccgcaaggtcgcctgcccgacagcaaagacccgaccaccgcgccggtggcgatcatccagcacgccgacatcaaacgcatgttgctgacccagaaagcctacgtggaaggttctttcgacctgggcctgtacgccgcgcgcctgttcgacgacaccacgaccctggaaaccgaagccgagcgcaaacaggcccacgaactgctggacctgctcacacccatcgtcaaatcctggccgtcggaattttgcctcaaggccaacgaactggcgatccagatcctgggcggccacggctacacccgcgaatacccggtggaacagtactaccgcgacaaccgtttgaacccgatccatgaaggcacccacggcattcagtccctggatctgctggggcgcaagctcgcgcaaaatggtggcgcggggctcaaacagctgattcgcctgatcgccgaaaccggcgcgcgggcccaggagtaccctggcctgactgcattaagagaacccttggagcagttagtgaaccgcctgcaaagcgtgacgataggcctgctgacggatctcgcccagggaaaggtcaacagcagcctcgcaaactcggcgctgtacttgaaagtgttcgggcacacggtgattggctggcgctggctggaacaagcgattcgcgccgaagaaggcttggccaacggcaatgcggccgacgtggccttctataaaggcaagctccaggctgcccggtacttcctgacctgggaagtgccgggctgccatcatgaactggcgattctggaggcacgcgatgacacgtgcctggggatgcaggatgagtggttctaaccgctaaggctgtccgatagccttggagattacatcgaccgtggcgctgacttgctcttggtaacggtcgagttcctgctggtggtgctttttcatttcgatctgctcggcgcacaggttcagcgcggccagtaccaataatttgtcgccgatcagggtcgggtactttttcttggtggtggccagggaagccttgagcatggtcacggcgtgcagcagggtttggtcttccccttgcggcgccttgatcgagtaatcctcaccgagaatcgaaacgacctttatcccttcattcatgcgctgacaggccctgcgctcacacgctcaaccaacgcctggatgcgcgctgcggtagcgccgttcttttcttcctgctccatcaggttcaattgcaggctgtcgttttcatccttggcacgggccagttctgccttgagggattcgttgctgcccaacaggtcctgattctgttgtacgaggtcgctgaccagttgttccagctggctgagggatgcttctaacattttgatttctcgggctttttcaaagggcggtgacgataaagaaaattcacctcggatgccagggttatccccggcgtacagcccgttttttaagggccgggccgcactttcgagccttagtgactgcaattacctgatctggttcctgaatcgcttgaacccctcgtcagatgcgacaaaagcgcgcacccatttaagactttagtcgtatggccgataggccttacacactctcgtctcaagcccgcacggatcgcggtccttccaggatctcagcatgtccctacgaaatatgaatatcgctccgcgggcgttcctcggctttgcgtttattggcgcactgatgctgtttctcggtgtgtttgccttgaaccagatgagcaagattcgcgcggccaccgacgacatcaccctgagcagcgtgccaagcattcgtgccctggacgagttcacccagctgaccctgcgcctgcgcgtgctttcctaccgcctgctgaccaaccgcgagccggaggtgcagcaaaagaccctgcaatcgtttgaaacccgcaaccagcagattcgcgccgcccaaggggtgtacgaaaagctgatcgaaagccctgaagaacgcgccgcgtataacgaatacctgcagttgctgagccagtaccgccagatcgaagcgcgcatgatgacgttgtccagcgccaaccagctcgatgagctgcgcacgctgctcaacaccgaattgctggccaactccgacaagatcaacgccacgatggaccgcctggtcgagatcaacagcaagatggcgctggcaaccaatcaggccgctaaagcccagtacgacagcgccttcagcctggtggtgggcctgttggtcctcaccacagcattgaccgtgctgttcgcctggctcctgacccgcagcatcaccgtgccaatttcccaggcactggaagcggctgaagaagtcgccgaaggcaacctcacacgcccgatcaaggttgagggcaacgacgaagccggccgcctgctcgccgccatggccaagatgcaggacaagctgcgcgacaccctgcaacgcatcgccggctctgccacccagctggcgtctgcggcggaggagctgaacgccgtgaccgacgaaagcgcccgcggcctgacccagcaaaacaatgaaatcgaacaagccgccaccgccgtcaacgagatgaccagcgccgttgaagaagtcgcgcgcaacgccgtcagcacctccgaggcttcgcgcaacgccaccacctctgccggcgacggccgtgacctggtgcaggaaaccgtcagtgccatcgaacgcatgagcggtgacgtacaagccaccgcgacattgattggcgatctggcgaatgagtcccgtgatatcggcaaagtgctggacgtgattcgcggcctggccgaccagaccaacttgctggcgctgaacgccgccatcgaagccgcccgcgccggtgaagcaggtcgtggcttcgcggtggtggccgatgaagtgcgggcgctagcccatcgcacccagcaatcgaccagcgagatcgagcgcatgatcggcagcatccaggccggcaccgagcacgcagtggattcgatgcgcaacagcaccgagcgcgcggaatcgacgctgaacatcgccaaaggtgcggggatgtcgctggatacgatcaatacggccatcgtggagatcaacgaacgcaatctggtcatcgccagcgcggcggaagaacaggcacaggtggcgcgggaagtggaccgcaacctggtgaatatccgcgacctgtcggtgcaatcggcgaccggcgccagccagaccagtgcggcgagcagtgaactgtcgcgcctggcggtggacttgaacgggatggtcggtcgtttccgtctctgactgccaacgcctatcctctgtgggagctggcttgcctgcgatggcatcacctcgatccacctgaagaccgaggcgcctgcatcgcgggcaagcccggctcccacacaagccagcgcccacgttgggtgcgcgcgcccaaaaagctttttgacagcgcagcaattcaacaggttagaatcgctggcacgcagactgcatggtcagtttgcgcctcgtctacccagttctggagtactgcctttgaatgcgacgaccatcaacagcctgttcttgatcggcgcgttgctggtaagtgcgagcattcttgtcagttctctttcgtcccgcctggggatcccgattctggtgatcatcctggcagtgggcatggttgccggcgtcgatggcggcggcatcatcttcgataactacccaaccgcctacctggtgggcaaccttgccctggccgtgatcctgctcgacggcggcttgcgcacacgggtggcgagttttcgcgtggcgctctggccggcgttgtcgctggccacggtgggggtgctgattaccaccggcctcaccggcatggccgcggcctggctgttcaacctcaatatcattcaaggcttgctgatcggcgccattgtcggctccaccgacgccgcagcggtgttctccttgctcggcggcaagggcctgaacgaacgggtgaccgccagcctggaaatcgaatccggcagcaacgacccgatggcggtgttcctcaccgtcactctgatcgacatgctcgccagcggccagaccggcctgcactggagcctgctcacgcacctgatccgcgagtttggcatcggcggtatcgtcggcctgggcggcggctggctgatgctgcaactggtcaaccgcatcaacctggccaccggcctgtacccgatcctggtcattgccggcggcctgttcgtctttgccctgaccaacgccttgcacggcagcggcttcctcgccgtgtacctgtgcggcctggtgatcggcaaccgcccggtgcgcagccgtcatggcattttacatatgctcgatggcatggcctggctggcgcagatcggcatgttcctggtgctgggcctgctggtcacgccgcatgacttgctgccgatcgcgttgcccgccctcgccctggcgctgtggatgatcctgtttgcgcggccgctgtcggtgatggtcggcctgctgccgttcaaggcgttccacgggcgcgaaaaagcctttatcgcctgggtcggcctgcgcggcgcggtgccgatcattctcgcggtgttcccgctgatggccggcctgccccacgcgcagctgtacttcaacctggctttctttattgtgctggtctcgctgctggtacaaggcaccagcctgccgtgggtggccaagctgctcaaagtgaccgtaccgccggaccctgcgcccatctcccgcgcagcgctggaagtgcacgtcaccagcgagtgggagctgttcgtctaccgcctgggcgccgagaaatggtgcatcggcgccgcgctgcgcgagctgaaaatgcccgaaggcacgcggattgctgcgttgttccggggccagcaactgctccatccgtcgggtagtacggtgctcgaagtcgacgatctgctctgcgtgatcggccatgaacacaacctgccggccctgggcaaactgttcagccaggcgccgcaacgcggcctcgacctgcgtttcttcggcgacttcgtgcttgaaggcgacgcccagctgggcgcggtgtctgccctgtacggcctcaagctcgaagggatcgacccggacatgccgctcagccgcttcatcacccagaaggtcggcggcgcgccggtcgtgggcgaccaggtggaatggaacaacaccctgtggactgtcgcggtcatggacgggaacagaatcggaaaagtcggcgtcaaattccccgaaggaagtcgtccgggccccgggctcttcctctaaactgcggggctatggcgccacgccccccaccttcttgaccttgctcgaccggtatccatgacgactctgcgcacctttttagccactgccctgctgggcctgaccctttgtgtcggcagcgttcacgcggccgacccgcccagtgccgatgccatccagcaaaccctggacaagctgcctgaccgcaagctgcccgacgccgacatgaaggcgctgcaatcaatcctgcaacagaccctgacgtatctgggcaacaagcaggattacgagcaacgcctcgccgacctcaagcgccagctggaagacgcgccgcgccagactactgacaaccagcgcgagctggtacggctcaaggccaccaaagtcatcccggttgcccagcgctatgccacattgccggtgccgcagcttgagcaattgctggtgcaacgcaccacccaacaaggtgacctgcaaaaagagctggccgacgccaacagcctgaccatcgccgcgcaaacccgcccggaacgcgcccagaccgaaatcagcagcagccagacgcgcatccagcagatcaattcgatcctcaaggccggcaaagacaacggcaaggcgatcagcggcgaccagcgcaaccagttgaacgccgagctcgccgccctgaatgcattgatcccgctgcgccgccaggaactggccggcaacagccaattgcaagacctgggcaacagccagcatgacctggtactggaaaaaacctcgcgcctggaacaagagatccaggacctgcaaaccctgatcaaccagaaacgcctggcccagtcccagcagacggtgacgcagcagtccatcgaagcacagaaagccgggggcagcagcctgctcgccacggaaagcgcggccaacctgaagctgtccgactacctgctcaaaagtactgaccgtctcaacgacctgacccagaaaaacctgcagaccaagcagcaactcgataccgtcacccagagcgactctgcgctggacgagcaaatcaacgtgctcaagggcagcctgctgctctccaagatcctctacaagcagaagcaagcgctaccgcgcctgacggtcgaccgcaacctggccgacgatatcgccaacattcgtttgtaccagttcgaggtcaaccagcaacgcgagctgatcagcacccccagcacctacgtggacagcctgctggccaaccagccgccggaagacgtcaccccgcaactgcgccgcaccctgctggaactggcgatcacccgcagcgacctgctggagcgcctgagccgtgagctgagcgcgctgctgaacgagtccatcacgctgcaactgaaccagaaacaattgctcagcaccgcgaccaccctgcgcgcgacgctggatgagcagatgttctggattccgagcaacaagccgctggacaccgaatggctggaaaccgtcccggatcatctgagcaaacaagtcaccaccctgccctgggcctccagcgtcagcgaactgtatgacggcctgacccagcgcccgctgctgttcctgccgttgttgctgctgattggcgcactgctgtggcgacgcaaagccctgtaccagcgcctcaacaaagtccacctggacatcggccacttcaagcgcgacagccagtggcatacaccccaggcgattctgatcaacattttgctggcgatgccggtgtcccttggcctggcactctgcggctacgccctgcaaatcgacgcccgcgggcaaaacgccaacctgggcgcggcgctgctgctgattgcccaggcgtggctggtgttctacaccgcctaccggattctcgcgccgggtggcgtggccgaactgcattttcgctgggaacggccacaggtggcctttttgcagggctggattcgcaaactgggcctcgtcgtactcgcactggtggccgtggtggccatcgccgagcaccaaccggcggcgctggccgacgatgtgttgggcatcggcgtggtgctgacctgttacgcactgatggcctggctgctcggccgcctgctgctgaacagcccgacccatgaaaaagcctcactgttccgcaagttcgtggggctggtgtttaccgccctgcccgtcgcgctgtttatcgccgtgtgctttggctactactacaccgcgctcaaactcagcgaccgcttgatcaacaccctgtacctgctgatgttctggctggtcatcgaagccaccttcgtgcgcggcctgggcgttgccgcacggcgcctggcctacgcgcgagccctggccaaacgccaggcggccaaggaagccggcgacggcgaagcggtcatcgaagagccgacgctggacatcgaacaggtcaacgaacagtcgatgcgcctgatccgcctcgccttgctcggcggctttatcgccgcgctgtactgggtgtggaaagacctgatcaccgtgttctcctacctcgacaacgtgacgctgtacgaatacaccagcggcaccggcgccaatatcagcatggtgccgatcagcatcggtgacttgctcggcgcctcgatcatcgtcggcatcaccttcgccctggcgcgcaacctgcccggcttactggaagtgctggtgctgtccaagctggacctggcccagggcagcgcctacgcgaccaccaccttgctgtcttacgtgatcgccggtgtgggttttgtctcgacgctctcaacgctcggcgtgagctgggacaagttgcaatggctggtggcggcgctgtcggtggggttgggcttcgggatgcaggagatcttcgcgaacttcatctccggcatcatgatcctgttcgaacgcccggtgcgcattggtgacaccatcaccatcggcaacctgtcgggcacggtgagcaagatccgcatccgtgccaccaccatcactgactttgaccgcaaggacatcatcgtcccgaacaagaccttcattaccgggcaactgatcaactggtcgctgaccgacaccatcacgcgggtcaccctgaaactgggcgtggactacggctctgatctggacctggtaaaggaactgttactcaaggccgccagggaaaacccgcgggtgcttaaagaaccagagccccacgtgtacttcctcaacttcggtgaaagcaccctcgaccacgaactgcgcatgcacgtgcgcgatctgggcgaccgcaacccggtgatcgacgaggtgaaccgctttatcaaccgcgagttcaagaaccaccacatcaatatctcgttccgccagatggaggtctacctcaagaacctccacggccaggaatacaaactggtggaagtcgacaccccggccaagcccgccaacgacggcggcatgcaggaaccaccgccgagcaaactcgactaacgcgcctatccccagcagaatgctcggacattctgctggagatggccggtgaaagccctcgacgaactgaccttcgacaaccgcttcgcacgcctgggcgacgcattctcgacccacgtactgcctgaacccctcgacgagccgcgccttgtggtggcgagcgatgccgccatggcgctgctcgacctcgacccggccgtggccgaaacgccggtgtttgccgagctgttcggcgggcacaagctgtgggccgaagcagagccacgggcgatggtctattccgggcaccagtttggcggctataccccacaattaggcgatggccgcgggttgttgctcggcgaggtttacaacacggcgggtgagcactgggacctgcacctgaagggcgccggaatgacgccctactcacgcatgggcgatggccgcgcggtgctgcgctcttcgattcgtgaattcctcgcctccgaagccctgcacgcgctgggcatccccagcagccgcgccttgtgcgtgatcggctccagcaccccggtgtggcgcgagaaacaggagcgcggcgcgatggtcctgcgcctggcgcccagccatatccgctttgggcatttcgaatatttctactacaccaaaaagcccgagcagcaggcgcttttggccgagcacgtattgaacctgcattacccagagtgccgcgaacaacctgagccttacctggcgatgttccgcgaaatcgtcgagcgcaatgcggagatgatcgccaaatggcaggcttacggcttctgccacggcgtgatgaacaccgacaacatgtcgatcctgggtatcaccttcgacttcgggccgtttgcgtttctcgatgactttgacgcgcacttcatctgcaaccactccgatcatgaagggcgttactccttcagcaatcaggtgccgatcgggcagtggaacctcagcgcgctggcgcaggcgttgacgccgtttatcagcgttgatgcgttgaaagaatcgctggggctgtacctgccgctgtatcaggcgcattacctggatttgatgcgtcggcgattggggctgacaaccgctgaagacgatgaccagaaactggtcgagcggctgctcaaactgatgcagaacagcggcgtggattacacgctgttcttccgtcgcctgggcgatgagtcagcggccctggctgtggcgcggttgcgtgatgattttgtcgaccgggccgggtttgatgcctgggctgagcagtacaaatcccgcgtttcacgggacggggaatacagcgaagcacagcgccgcgagcggatgcacggggtgaacccgctgtacattctgcgtaactatctggcacaaaacgccatcgccgccgccgagtccggggattacagcgaagtgcggcggctgcatgacgtgctgtccaaaccgtttgaagagcaaccggggatggagcaatacgcacagaggccaccggattggggcaagcatttggaaatcagctgttcatcgtaaggagacgcacccatgaggctttctgacatcccggccgggctattacgcagctcccgcctgcacctcaccgcgcccgcgctcgaaagggccgaggccatgcatggcctgatcagcgacttcagccagccccacaccgatttcctggtctgggccgacggcagctccaccctggaaaacgcccgcgccaacatgcaaacggcgctggatgacttcaacgccgacaggaacgaataccggttcctgattaccgagaacggctcgggcgcactggttggctgcatcagcctgatgattcacgacctgcgcataccctatctggaaatcggctactggatcggcagccagagcatgggcaaaggctacgccagcgaagcctgcgccctggtgcgggacatcgccctggagcacttcaacgccaagcgcatcgaactcaccaccgccgggcgcaacacacgcagcatcaaagtggccgaacgttgcgggttcatccgcgaggccgtgctttccaatacccggatcgataaggccggggtggtggatgacacctgcgtgtatgtgttcacaggtgccgtacctagataaaggtttccactgaaaccccaaaacgctccgccagccaacgaatttgccgtacgttgagctggcgcttgccgctcaatatctcagagacgacggattgagcgccaacgcccggcaggtcgctctgggtgaggttgtgttcacgcatcatgtagcgcagcacgtcgacaccgctggcgacgggcatggggcgatgctcatgatcgtaagcttcgatccagtcactgaggatatccaccaggctcatcagcgggctgtcctcgttttcgccgatcaggctcaacaactcgtccagtccgcacaccagcgcgtcgtaatccgcctcgttttccggcttgcgcatgactggcgaaacgaattgccagtgttccgccgctacccgcataagcgcgctcatcttattttttccttccatttgtctttctcataatcgcggtgatcaagcaggtgcttgatgtaaacgcgctgcgctcgatactccacgcccgcaatcaacctcagcttgttgccgccaatatcgaatacatgaaacaccccgaccttatccgtggcgggaaacatggttttcatcgccgcgaagtctttcgggtcgtttcgcttcatgacccgataccactgatccaacgctgaggctgaacgtggccacttttgcttggcttcccagattcttttttcactgatcactcgcatgcaacatccttatcgcagcttgctatgaaggttaaacccgaattctgaatatcgcaatttgctatacctgcaaacagaccaatggctcaaaacagagcagactcaaacagcctagatccgcgccccgggatcagcacgggcgaaactgtgagcggatgagtcgccttgataaaccctgagtccggctccaaatagagtccattggccctatcagagaagcccaccatgtccgaaccacttgtaatcccctgcccccactgcaacggcctcaaccgcatccccaacgaacgcctgggcgatgcgccgaaatgcgggcgctgcaagcagccggtgttgctgaccaagccttttgagttgaaacagggcgactacgccagccagataaagggcgatttgccgttgctggtggatgtgtgggcggactggtgcgggccgtgcaaatcctttgcgccggtgtttgagcaagcggctgggcaattggagggtaaatgccggttggcaaagctggacagcgaggcgaatcagcagttgtcggcgcagttggggattcggtcgattcccagtctgattctgttcaagaatggccgtgaagtggcgcgtcagagcggggcgtttccgttgccgcagttgatgagctggttgcgaagccaaggcgtttaacacggtcaaatgtgggagctggcttgcctgcgatggcatcacctcggtgtaactggcagaccgagttgcctgcatcgcaggcaagccagctcccaccctgaccgcgttttaacctcaggctagtggggcttcgcggtccatcatttggccgaccagcattacgccgagctcgcttagttgatggatggccagggccacatcgcggtgttcgccggtgaggtcgttggacaggttgagcaacagggtgcgcacggacgagaaggtttcgtagctgttgagtacgagggtttcggtggggaggttgggggcaacggtataaaggttaaccatggatcgtctccgagcaggagctgcaacccgacgctactaaacgaagggtggcagctgtacgcaggttagtagaccgggagacgaaccggcgcgctcgaaagcgccctccgcacagccaccatcaaattcaggaaggtcctgaccgaagatttgccgtacgtctcacagcgggctactaaacccgatcactgaacattcagcgaccgaagaaccttagagacgcccacccagacgcacaagccgggcgattctggcttatctgtaggtaacgagacaaggcacaaccctgtttgccagagccttcctacagcctctgtgggacaaatccccctgaagacatgcaaaacaaatgtgggagctggcttgcctgcgatgcaggcaactcggtctaccagttggaccgaggtgatgctatcgcaggcaagccagctcccacaggatcatgcagtgttcgcaagggttcaggcgttttccagcaagttatgcaacgccacaaactgctgcgtcagcttgtgccgtgggtccaggtgaatcagcggtttgctctcctggtgcgactcgcgcatgcgcaccgagctggccaggtacaccggcagcaccggcaaaccctcggcaatcaactcatcgagcatttgctgcggcaggctcgcccgagcctggaactggttgaccacaatgccttccacctcaaggccttcgttgtggtcttccttcaattcttcgatttccgccagcaagccatacagcgcctggcgcgagaagctgtcgcagtcgaacgggatcaacacgcgatccgctgcaatcagcgccgaaaccgcgtagaaattcagcgctggcggcgtatccaggtaaatccggtcgtaatcctcgctcagctcatccagcagctttcgcagcttgttgatcttgtgcttggcctcgagcttgggctgcaggtcggccagttccggggtcgcggtgatgacgtgcaggttgtcgaaaggcgtttcgtagatatccaccttgttcttcttggaaaacggcccggaagacagggtttgcttgaaaaaatccgcgatccccatagggatatcgtcgccggtcagcccagtgaggtactgggttgagttggcctgtgcatcgaggtccaccaacagggttcgataaccttcactggcgctgaccgccgccaggttgcaggcaatgctggacttgccaacgccgcctttctgattgaacaccacacgccgcatggaaaaacctccgtgtatcaatgaatgcccgagtgtagagggcaaaagcgcctgttagctacctcgttcattcatgcactgcggcatcgcaagccttttgcgcgctgactgtcatccactccctacgcaggaacaggacaaggccgacaatccaatcagccccttgctaaaggacaatctgtaaatctttccaaccaaattgtaatcggccgtgaacaattctttaccaaagtttgctagaaccccgcagcaccgggataatgcgcgccactcggcgattgctccctgtcccggtattcggggccaatggccgcacatggaagcccgcaggggcgggataacttctcagtgatcactttcaacatcgcccaatggcgcgcctgggctcccggcctggagagcgcggacgactggcacgcctggtgccaggcaccggtgttgctgcctgccagcgatgcatctcccgacgtgtcatttttgccggccatgcaacgccgccgtctcagccgcatggcgcgcatggcgttcagcgtaggctggccgctggccgagggtctgcaagacctgccgctggtgttcatttcacgccacggcgaaaccccgcgcaccctcgacattctcagtgacctggccaacgacgagccactgtcgccgacccagttcagcctgtcggtgcacaacgcagtgattggcctgtggtcgatcctgcgcaatgaaaccagcgaaatgacggccctcgccgctgccggcgatggcctggaacacggcatgctcgaagctgccgcgctgctcagcgagggcgccccggccgtattgctggtgatcaccgaagaacagccgccccaagcctatgccggctggatccacgacgtgccattcccttacgccctcgggctgctgctgacacccggcgacgagtggcagttggaactaaacagcggcgctgtccaactcagtcacacacagtggccccacgccctgaacctgctgcgcaccctgctcaccgagcaggccacttgccaacatgcctggaagaaccgtgtatggaactggcaacgcaagccctgaccgacaaaccacagcacgcctattactggcgcctgttcgccaccgccacgagcttctttctgttcggcgtcggcgggctgtgcctgcgcctgctggtattcccgctgctcagctgcctgccgggcagcgctgaaaagcatcgccagcgcgcgcgccataccatcagccggctgttctggctgtttatccgcatgatgcaacgcgccggggtgctgacctacagcgtcgagggcgccgaaaacctcggccgcccgggccagatgatcatcgccaaccacccgtcgctgatcgacgtagtgttcctgatcgggctgatgcgccagaccaattgcgtggtcaagcaaagcctgtttcaaaacccgttcatgcgcgggccggtgcgtgacgcaggctatatcagcaacgatggcagcgccgagatgctcgatgcggcagccgatgccctgcgcgaaggtcaaaccctgatcatctttcccgagggcacccgcaccactcccggcgcggcgcctgcctttcatcgcggcggtgcagccatcgccctgcgcggtgcgacaatcatcaccccggtggtgatcaaggtcagccccaccaccctgaccaaggccgagccctggtatcgcatccccaaacgccgatttcattttagtttgcgcgtaggcgccgatatagaaccacaggcgttcgcagcactcgggcccgcgccccaggcttcacgcaagctcaacgattacctgcaccactatttcattaaggagctcgccgaagatgagcgacagacacagccttgagcacgacataaagacgctgatcattgaggccttgggccttgaagatatcagcgtcgacgacatcggcagcgaacaaaccctgttcggcgaaggcctgggcctggattcggtcgacgccctggagttgggcctggcgattcagaaaaagtacggcatcaagatcgacgccgacgccaaggacacccgcaatcacttcatcaacgtggccagcctcgcggcgttcgtcacggcccgacaggcagcttgagaccgtaccatgcaaactcgtgacgatattttcaacaccctgcgcgatgccttggtggaactgttcgaactgccgccggaacgcgtcaccctcgacgccaacctgtaccaggacctggaaatcgacagcatcgatgccgtggacctgatcgaccacatcaagcgccagaccggcaagaaaatcgccgccgaagagttcaaggccgtgcgcacggtcaacgacgtagtagaggcggtgtaccgtctggtccagccagccgcatgagccgcttgatcggccttggcctgttgctggcggggctgctgtacccctttgcggtgtattacggcaccgagcactttgcaccctggcaattcggcttgctgctgggcagcctgtggctgttgcgcgcactcaccggcgcgcggcgccccggcagccgctggatggccgtggccgtgatcgtgttttgcctggccctggcctggttcgatagcccgcagctcctgcgctggtacccgagcctggtcagtgcattcatgctggcgctgttcggtttgagcctgcaatacggcccgccggtggtcgagcgcctggcgcgcatgaacgatcccgacctgccaccaaaggcgattgtgtatacccgccaggtgaccgtggtgtggagtgtgttttttttgtgtaatggcctgctcgccgccgccctcaccctgtgggcgccactgagctggtggacgttgtacaacggcctcatcgcctatggactgatggggctgttgtttgccgtggaatggctggtacgacaaagggttcgaggccgcgtatgaaaggtttgaaacttgagcacctgctgcttgagccgctgcaacagcgtccggtgactgccgaacctgccatgaatcatgcccagctgtgggaacaatccctgagccttgcggcagggctgcaagcgcgcggcgtccagcgggccgcggtgcacctggaagacgccggcctgctggcgattgcgctgttgggcgcgtggcgagccggggtcagcgtgttattgcctgccgacctgcaaccccagacccgccaacgctgggacagcgccgttgacgcctggctggtggaagccgctgacctcgacgcgttgtatcaagcgcccctggaacccgcagcgttggacctggacacctgccaattgagcctgtgcacctccggctccagcggcgagcccaagcgcatcgacaaatccctgcggcagctggccaacgaagtgcaagcactggaaagcctgtggggcgcggacctgaaggacgcctgcatcatcggcagcgtggccacgcagcatatctacggcctgctgtttcgcgtgctgtggccgctgtgcgccggtcgcacctttgtgcgccagcaactggcgttccccgaggatatgcaacgcgccagccgccaacacccacaatttgcctgggtcgccagccccgcgctgctcaagcgcatgggcgacaacctcgactggcccgcgctgagccaggtttcacgggtattttcgtcgggcggtgcgctgcccgtcgaggccgctggcgagctgtatgaccgcctgcaacaatggccgacggaaatcctcggcagctccgaaaccggcggcatcgcctggcgccagggtgcgcaaccctggcagccgtttgccgacgtgcaattgagccaggacgccgacggcgccctgcgcattgcctcgccgtatttgcccgaagggcatctcgaacagactgccgacgctgcgcgtatccactctgatgggcgttttgagctgctcgggcgcctggaccgcatcgtcaagctggaagaaaaacgcatctccctgcccatgctcgaacaggcgctgatgagccacgcctgggtcgccgaaacccggttgggcgtggtgcaggaaaaccgtgcatcccttggcgcgctggtggtgttgagtgctgatgggctgcacgctctgcgcaaccagggtcgccgcagcgtgacgcaggccttgcgcgaacacctgagcgaacactgcgaagcgttggccttgccccgccgctggcgtttgctgcgccagcttcctctgaacagccaaggcaaactgcctcaggcgcacgtcgaagcattgctggtggcccctcggccaaaagcgcccgaagtgctggagcaagtcgaggccgatggcgaatggaccctgcaactgaccatcccgccggacctggcctatttcagcggccacttcccggccaccccggtgctgccgggtgtggtgcaggtggaatgggcgttcaacctgggccagcaattgctcgatctgccagccacgttcgccgggatggaagtgctcaagttccagcagttggtgcgccccggcgacaccctcgaactgcacctgcgcttcgacgcggaacgcagcaagctctacttcgcctaccgcaatggagttgcagcctgttccagtggccgcatagtgctagagatgcgaaatgagtaggcttctgtggcgagggagcttgctcccgctggagtgcgaagcactcccaacccaggcactgcaatctgccagggggatctcggtcgacagtattggggctgcttcgcagcccagcgggagcaagctccctcgccacaggggttgcagcaatcctggagatcacctccatgcataacccctgcgccctgatcccggtctacaaccatgaagccgccgtgccagccgtggtacatagcctgttaaacagcggcctgccgtgcctgctggtggacgacggcagcagcccgacttgcgccgccgtactcgcacaactggccaccctggaaaacgtcaccctgctgaccttgccctccaaccaaggcaaaggcggcgcggtcatggcgggctttcgcgaagccgcgcggctgggctatagccatgcgctgcaggtcgacgccgatggccagcacgacctgcgcgaagtcgagacgtttatcgacacctcgcgcaggcaccccgatgcggtgatctgcggctaccccgaatacgacgacagcgtgcccaaaggccgcctgtatgcgcgctacctgacccacgtgtgggtgtggatcaacacgctttcgctgcaaatccgcgactcgatgtgcggctttcgcgtgtacccgctggcgcccactctggcgttgatggactcggcctacatcggcacacgcatggatttcgactccgacatcctcgtgcgcctggcctggcgcaaccagccgatgcgctggctggcgacccaagtgcactaccccaccgacggcctgtcgcactttcgtttgttccgcgacaacgtacgcatctcggtcatgcacacccggctgttcttcggcatgttggtgcgcgcgccgatgatcctgtggcgacggtggaaagcatgagcgacagcaccaagcactgggcagaccgcgaggagcgcggcagcttctggctgatgaaactcaccgcgttcgccgccaaagtgctgggccgtcgcctgctgagcccggtgctgtacggcatcgtcttgtactttttcctgttcggccgcaccgcgcgccagagcgcctgggaataccagcagcgcctggccgactggagtggccgcgatgaactgcgccccaccctgaaatccgtcttcagccagttcatggccttcgccgattccttgctcgacaagctcgacgtgtggaacggcaagctgcgtatcgaccagattgaaatcaacgacccggcgcaactgcgcggccaactgcgcggcgaacgcgggcagatgctggtgggcgcacacctgggcaacctcgaagtctgccgcgccttcgccgagatcggtgagcaagtcaccatgaacgtgctggttcacaccaagcacgccgagcaattcaaccgcctgctgggcgaagccggggccacgcatttgcgcctgattcaggtcagcgagctggacccggccaccatgctgctgctcagccagcgcctggacgaaggcgagtggctggccatcgcgggcgaccgcgtgcccctgcatggcgggcgcaaggttcgcgtggacttcctcggcattgacgcggcattcccccaaggcccatggctgctggccggtctgctgaaatgcccagtcaatgtgctgatgtgcctcaagcacaacggccgctaccgcctgaccatcgagccgttcgccgacttgatcgaatggaagcgcagcacccgcgagcaggtgatcgcccactgggccgggcgctacgccgcacgcttgggccagttctgcctggaagcgccccaacagtggttcaacttttaccctttctggaagaccgatgacgacgcatcttgagccggtaacctttggcgaacgccccttgcgcattgaagacgtgctggccctggccaaccgtcaggcgcccacgcagctgcaaaacgacgccgcgtaccgccagcgcattgccaaaggcgcgcagttcctcgactcgctgctggacaaggaaggcgtgatctacggcgtgaccaccggctatggcgattcctgtgtggtggcggtgccgttgcaacacgtcgaggcgctgccgcgtcacctctataccttccacggctgcggcctgggcaagctgctcgacgcgcaggccacccgcgcggtgctggcggcgcgattgcagtcgctgtgccatggcgtgtccggcgtgcgtgtggagttgctggagcgcctgcatgcgttcctggaacacgacgtgctgccgctgattccggaagagggctcggtgggtgccagcggtgatttgacgccgttgtcctacgtcgctgcgaccctgtccggcgagcgcgaagtgatgttccgtggcgaacgtcgccaggccgccgatgtgcaccgcgagctgggctgggacccactggtgttgcgcccgaaagaggcgctggcactgatgaacggcaccgccgtgatgaccggcctggcgtgcctggccttcgcccgcgccgactacctgctgcaactggccacgcgcatcaccgcgctgaacgtggtggcgctgcaaggcaacccggaacacttcgacgagcgcctgttcgccgccaaaccgcatcccgggcagatgcaagtcgccgcgtggctgcgtaaagacctggcgattgatgcgccgaccgcgccgctgcatcgtttgcaggaccgctattcgctgcgctgcgcgccccatgtgttgggcgtgctggccgacagcctgaactggctgcgctcgttcatcgagatcgaactgaacagcgccaacgacaacccgatcattgacgccgaagaagaacgtgtgctgcacggcggccacttctacggcggccacattgccttcgccatggacagccttaaaaccctggtggcgaacgtcgccgacctgcttgaccgccaactcgcgctgctggtggacgtgcgttacaaccacggcctgccgagcaacctgtcgggcgcaccagcggatcgcgcgatgatcaaccacggcttcaaagccgtgcagatcggcaccagcgcctggaccgccgaagcgttgaaaaacaccatgccggccagcgtgttctcgcgctccaccgaatgccacaaccaggacaaggtgagtatgggcaccatcgccgcccgcgatgcgatccgcgtactggagctgaccgaacaggtcgccgccgccaccttgctcgccgccaaccagggcgtgtggctgcgcgcgcaggctgaagatgcgcgcccattgccaccggccttggccgccatgcatgaagagctcgccaaagacttcccgccggtcatcgaagaccgcgcccttgaaggcgaactgcgcctgtgcctgaaacgcatcgccgaacaacactggaggctgcatgcgtagccagggcgtgctgcattgcgacactgaaatcctcgtgccgtttttcgacgtcgacaccatgaacgtcgtgtggcacgggcattacgtgaagtacctggaagtggcgcgctgcgcgctgctggacaagatcggccacaactacacggcgatgcttgaatccggttacggctggccggtgatcgatatgcaactgcgctatgtacgcggcgcggtgtttggccaaacgatcaacgtgcgcgccagcctggtggagtgggagaaccgtttgaaggtcaattacctgattaccgatttggccagcggcgagcggttgacccgtgccagtaccgtgcaagtcgccgtggaaattgccagccgcgagatgcagttggcctcgccaaaaatcttcaccgacgccgtagaaaggactctgaaatgctgactcctgtgggagcgggcttgcccgcgatggtcgtcaacgataatgcaattcgcctgattctccgcagcgtcctcaggttcatcgcgggcaagtcgagacgtcgcaccgccgctcccacatttttgattgggttgttcctgagcttcagcgcccacgcctttgacttgcaacagctgagcgaccaactcgccaaaccctccgtgatccacggcagcttcacccaggaaaaacacttgcgcgccctgccccagcccctggtcagcaaaggcactttcgtgctggccaaagaccacggtctactctggctgctcaagaccccgctgcaacaggactaccgcatcagcgcccaaggcattgcccgccgcgacgccaacggctggcaactgctgcccaacaaaagcgccggcgccgagcagaatcgtttgttcctcgccgtgctccagggcgacagcagcggcttgcagcgcgacttcgaactgcaactgcagggcgaagccaacggctggaagctgacgctgatcccacgctcactgttgctcaagcaggtcttcacccagatcaatatcgacggcggcgagctggtgcaaacaatcgaactgctggaaacccagggcgacagcaccgttttgcgcatgcaggacagcacggccagccaaccgttgaccgaagcggagcagcatgactttgcccagtgagcgcctgctgccgcgcctgttcctgagcctgctggtggccgtgctggctctggccggctggcagtggcgccacggtgcgccattgtcggcgaacctgatggagctggtgccgggtagtacgccggacgcgctggaacaacgcgccgaacagcgcatgcaggaaccgctgaaccgcgaaatgctggtactggtcgggcatgccgaccgcgagcaagcggtagccgtggcgcagcaactgggcgagcgctggcaggccagcgggctgtttgaaaaagtgcagtggaacctgcaggccgacctgcccgccctgcgtgaacaactgctgcgcgggcggctggcaatgctctcggccaaagaccgcgagcaactgatcgaccaccccgacgccttcatccagcagcgcgtgcaatccttgttcgaccccttcaccgggttcagcttggtaccaagccaggacgactggctgggcctcaccgggcgcatccagaacagccagccgcaccacggctcggtgcagctggatatcggcagcggcgcgttgatcgccgacgccgacggcaaaagctgggtgctgctgcgcgcgcgcaccaccggcaatgccttcgacatgaaactgcccgtgcaagtcgcggatttgctcaaggccagccgtgaacaggcaagcgggcaaggcgcgcaactgctcgccgccagcggtttgctctacgccgccaacggtcagcagcaagccacgcgggaaatgacctgggtaggcggcggcgccacgctgggcatcctgttattgctgttgctcgcattccggcgttggcgcgtattgctggcctttgtaccggtgctggtgggcatgctgtttggcgcggtggcctgcgtggcgctgttcggccatatgcatgtgatgaccctggtgttgggctccagcctgatcggcgtggccgtggactacccgctgcactacctgtcgaaaagctggagcctgcagccgtggcgcagctggccggccttgcgcatcaccctgcctgggttgagcctgagcctggcgaccagttgcatcggctacctggcgctggcctggacgccgttcccggcgctcacacaaatcgcggtgttctccgccgccggcttggtcggtgcttacctgtctgccgtgtgcctgctgcccgcgctgctcaagggcgttgaactgcgcccggcgcagtggccgctgcgtatcgccgagtgtctttggttggcacgcactgcattgctcaagcgcgtgccaagcccggtgctgctggcgttgctgttgctgttttgcgccggcggcctgtggcacttgagcagcaaaaacgacatccgccaatggatcggcgcaccgccgcaactgctgcaagaagcccaggccgtggcgcgcatcaccgggttccagcccaccagccagttctttctggtgcgcgccgacaaccagcagcaattgctggagcgtcaggccgcgctgggccagcgtctggatcaactggtgaacatgaataaactccagggctatttggcgctcaaccaattggtcagcctgcccgccgagcaacagcagttgcgcgatgcgctgaaccaactgccgcaacactggcagccgctgctggaccttggcgtgcccgccagcgccttgcaggccgaagtcacacacttgcaagcactgcccaccgaggacatcgatgccgcgctggccggcccgctcgccgaaccctggcgcacgctgtggctgggcccggtggacggcggcgtggcagccatggtcagcctgcaaggcttgaacaacccggcgctgctgcgggtgcaggcgctggatttgcccggcgtgcaactggtggatcgcctcggcgacctgaatcgggtctttgccgacacgcagatcagcgcggcggaactgaagttgatgtcctgcgtgctgatcgtgttgttgctgatcctgccattcggttttggcggcgcgttacgcatcgtcgccctgccgctgctcgccgcactgtgcagcctggcgagcctcggttggctgggccagccgttgacgctgttcagcctgttcggcctgctgctggtcacagcgatcagcgtggattacgcgatcctgatgcgcgaacaaatcggcggcccggccgtcagccttttaggcacgctgctggcggcgctgacgacctggttgtcgtttggcctgctggcagtgtcgagtacaccggccgtgagtaatttcggcctgtcggtcagcctgggcctggccttcagctttatgctggcgccctgggccggccatcagaagcacgcctcatgaatgtgattatcgccaaagtggcaaggagccctcgtgcccacagttgaaatggaacgtcgccaggtcgtcgtgatcggcgccgggccgtccggtgccatcgccgccgcgttgttaaagcgcaacgggcatgatgtgttgattattgagcgccagcattttccgcgtttctccatcggcgaaagcctgctgtcgcattgcatcgactttatcgaagaagccggcatgctcgacgccgtgcaggccgcaggctttcaggtgaaaaccggcgcagcgtttgcctggggcgagcgctacagcgcgtttgatttcggtgacacgttcagcaatggcaagccgaccaccttccaggtgcaacgcggcgaattcgacaaattactggccgaccaggcccacttgcagggcgtggacattcgctacggcgaaaccatcgtcggcgtggatttcagcggcgaaagccgctacctgcacgtgcgccgcgagaacggcagcgaataccacctcaaggccaggttcgtgctcgacgccagcggctacggccgggtattgccacgcttgctggacctggacgtaccgtcgaacttcccggtacgccaggcggtgttcacccacgttgaagatcacatcgaagacccggggttcgaccgcaccaaaattctcatcaccacccacccgacgaagcgtgatatctggttctggaccatcccgttcagcaacgggcgctgctcggtgggcgtggtcgcggcgaaagaacatttcgctggccgcgacgaagacctcgacgcctgcctgcgcggttttatcgctgaaaccccaagcctgtcacgcgtgctgcacaacaccgtgtgggacacgccagcgcgaaccatcggcggctacgcggccaacgtcaaaaccctgcacggcccgggctttgcgctgctgggcaacgcagcggagtttctcgacccggtgttttcctccggcgtgaccatcgccatgcgttcggccagcatggcggccggtgtgctgcatcgtcagctcaagggcgaaaccgtagactggcaaaccgagtttgccgagccgctcaaacgtggcgtcgataccttccgctgctacgtcgagggctggtacgccggcacgttccaggatgtgattttccacccgggcagctcgccggagattcgtcgcatgatcagttcgatcctcgccggttacgcgtgggacgagcgcaacccgtttgtcagcgagcccaagcggcggttgcggatgttgtcggaaatttgtgcgggtgagccagtatgagcagtcagtacctgagtaaaaactacgtcgaagagaccaaattcggcttctggttcctgcgcagccatacctggcagcaccacgtgctgcgcgtggcgatcaacgacctgcgcagcttgtttaccgatccgctgccggcggcgccggtactgctggacgccggatgcggccagggcaagtcgttccagtatttgcagcaagtgtttgcccccgaacgcctgatcggcctggatgccgaccctcacagcctggcactgagcaaggccgaggccgcgcgccagaacctggccattgagttgatcggcagcgactgcgccaccctcgacgtgccggacgaaagcgtcgatatcttgttctgccaccagaccttccaccatctggttgaacagcatcgcgcgctcaaggagttctaccgcgtgctcaagccgggcggctatttgctgtttgccgaatccaccgaagcctatatcgacacctgggtgattcgctggctgttccgccacccgatgcacgtgcagaaaagcgctgaggagtacctggagatgcttcgcgaacagggctttgagttcggcccgcagaatgtctcgtacccgtatttgtggtggagccgttccagcgatttcggcctgctggagcgctggggcttacgcaacccgccgccggtgggccagcgcgaagaaaccctggtgaactgcgtggcccgcaaacctttgacgagcgccgcgccatgatccgcctgctgctgatcggctgcctgttgctgttgagcgcctgcgccagcgggccaccgctgcccgagaaaaccccggccctggacctgccgatgcaactgcatgtgcagcgccgcgccgatggccagagccaagactggctgttggtgatccagcgcgaaggcggtgggattcgctggtccatgatggacccgctgggcattccccaggcgcggcaaaagctggtcaatggccagtggcaggccgacggtttgctgccacccaatcctcaagcacgggagctgtttgccgcgctgttgttcgccctcacctccgctgacgacgtgccggcgctctaccctcaagctcaggccatggacctgacacgcacgctgccggggcattggcagatcgtgtatcagtcctcgcaagtgttcagcgtgaacatggcgggccaaccattgagctaccgcatcacgccgcttggggctgcacgatgacggcttacctgaatgccctcggtgtgatttgcgcgctgggccgtggccaggccgacgtcagccgcagcctgtttgccggcgactgctcgggcatgtgcgccgaaagcggctgggtaccggagcgcgtgttgccggtggccggcgtgcacggcgagctggcggcgattccaccggcactgaaccagcaaagcagccgcaacaatcagttgctgctggaggctgcgttgcagatcgagggtgagctgcgccaggcgatcgccacctacggcgcgtcacgggtcggcgttgtgctgggcaccagcacgtcgggcatcgacgaagccagccgtggtatcgcgcactacctgcgcgaccggcagttcccaggcgactacgactaccagcaacaggagctgagcgccccggcgaacttcctcgccgactggctgcaactcagcggcccggcctatgtgatttccaccgcctgcacctccagcgcccgtgcgttgatgagcgcccagcgcctgctcgacctgggcgtgtgcgacgcggtgatctgcggcggcgtggacagcctgtgcaagctgacactcaatggcttcacgtcactggaagcggtgtcgagtgagcgctgcaacccgttttcggtgaaccgcaacggcatcaacatcggtgaagcggcagtgttatttctgatgacccgtacacctgcgccgattgccctgctgggcagcggcgcgagctgcgatgcgcaccatatctctgcgccagaacccacgggcaaaggcgcgttgcaggcgatgcgcaaggccctggccagtgcaaagcttgcacccgaacagatcggttacctgaacctgcacggcaccgcgacccagcacaacgacgccatggaaagcctggccgttgccagcttattccctgatggcgtggcttgctcgtcaaccaagcctatgagcggccacaccctcggcgctgcgggagccctggaagccgcgttttgctggctcagcctgacccacggcgtgctgccgccccatgtgtgggacggccaggccgacccgatgctacccaccttgcaatgggcaggcgccggcgacaccttgaaaaagacctgcctgatgagcaactcgtttgccttcggcggcaataacgtcagcctgattattggagaggccccatgatcccttggccactcgccgaactgctgccccacgcgggcgacatgatcctgatcgaccaggtgctgtccttcgatgaagagcaggttcacacccgcaccctcgtcaagcccggcggcctgttcaaccgtgccgacggcagcctgcccgcctgggtcggcatcgagctgatggcgcaaagcgttgccgcctacgccggttgccgcgcgcgccagaaaggcgaagcggtggagctgggttttctgctgggtacacgcaagttcgaatgcaacgtggagcactttccggcaggcgccgagctgactatccacggcctgcgttccctggaagacgacaacggcatgggtgtgttcgaatgccacctcaccggcgacggtatccaggccagcgcgcgcttgaacgtatttcgaccgccccaggcggccaactatttagatgaatcaaaggacgaaacgccatgactgaatccgtactggtcaccggctccagccgtggcatcggccgcgccattgccttgcgactggcccaggccgggcacgacatcgtgctgcattgccgcagtgggcgtagcgaagccgacgcggtgcaggtcgagatcgaagccctgggccgcaaggcgcgggtgctgcaattcgatgtgacggatcgtggggtgtgcaagcaaatcctggaggccgatgtggagcagcatggtgcctattacggcgtggtgctcaacgctggcctgacccgcgacggcgcgtttccggccttgtcggaagacgactgggacgtggtgatgcgcaccaacctcgacggtttctacaacgtgctgcacccggtgatgatgccgatgattcgccgccgcgcggccggccgcatcgtgtgcatcacctcggtttccgggctgatcggcaaccgtggccaggtcaattacagtgcgtccaaagccggtttgattggtgccgccaaggcgctggccattgagttgggcaagcgcaagatcaccgtcaactgcgtcgcaccaggcttgatcgacaccgccatgctcgatgaaaacgtgccggtggaagagttgatgaagatgatccccgcgcagcgcatgggcacgccggaagaagtcgcgggggcggtgaatttcctgatgtcggctgaggcgggctatatcacccgccaggtgttggctgtgaatgggggcctgtgctgatgaaacgcgtcgtcgtcaccggcatggccggcatgacctccctgggcagcgattgggcgaccatctcggccaacttccgcgccaaccgcagcggcattcggcgcatggacgagtgggaccgttttaccgaattgaacacgcgtttggccgggcccatcgacgatttcgttgtgcccgcgcactggacacgcaagcaactgcgcagcatgggccgcgtctcgcgcctggccgtgtgggcggcggagcaagcactgaaagacgccggtttgctgggcgatgaatcgatcaaggacgggcgcatgggcgtggcctgcggttcatccaccggcagcaccgacgagatcaaggcgttcggcaatatgctgctcaattcagtggccgaggggctgaatgccaactcctacgtgcgcatgatgccgcacaccacggcggcaaatatcagcatcttttttggcctgacgggtcggttgattcccacgtccagcgcctgcaccagcggcagccagggcatcggttatgcctacgaggcgatcaagttcgggcgtttgccgctgatgcttgccggcggcgctgaagaactgtgccccactgaagccatggtgttcgacgcgctctacgccaccagcctgaaaaacgacgccccgcaaaccagcccgcgcccctacgacagcggccgtgatggcctggtgatcggcgaaggcggcggcatgctggtgctggaagagttggaacatgcattggcgcgtggcgcacacatccacgccgagctggtcggtttcggcagcaacgccgacggccagcacaccacccgcccggagcagaaaaccatgcgccgcgcgatggagctggcgctggaagacgccgggcttgagccttcggccatcggctacgtgaacggccacggcaccgccaccgaccaaggcgatatcgccgagacgctggcgaccagcagcctgttcggcagccgcatgccgatcagctcgcagaaaagcttccttggccacactctcggcgcctgcggcgctttggaatcgtggttcagcatcgagatgatgaaccgcgaccagtacgtgcacaccttcaacctcgattcagtcgacccgcagtgcggcgagctggattacctgagaggcgagttccgcgagatgcaacacgactacgtgatgaacaacaacttcgcgtttggcggcgtgaacacgtcgctgatctttcgccgctggtcctgaattttttaatcgattggagaaaacggaatgtcttccctgctacgcgccaccctgatcaccctggccctgctgaccaccgccggttgcaccaacaaaccggtgctcaatacccagcacgagctggcggccaacccccaggccagcgaagaaaccatgaagcaggtgatcgtcactgccctgcaaaaacgtgaatggaccgtgcaacgcctgagcccgcagctggttcaggccgagatcaccgtgcgcggccagttctacgcggccatcgatatccgctacacccgcaacagctacgccatcacctaccgcgacagtcgcgacctgggctacaaggacggcaagatccaccgcaactacaaccgctgggtgagcatgctggatcgcgacatcctggcggcactgcgcagcaatggcatgaattaatcagatcatgtgggagctggcttgcctgcgatgcgggtgcttcggtggatcaggtgaaccgaggtgatgcaatcgcaggcaagccagctcccacatggatttgcttcgttttaaagtccgcgtttattactggacggatttgagtgtcaacaactcgacaaacgcctgtgccatcggcgtctgcacgcccttgcgttgcaccagccacaccgccgtcatcgcctcctgatccagcagcgtgcgatacaccaccccatcgatccgtatgcgctggtacgacgccggcagcaccgacacgccgagccccgctgcgaccagaccgatgatggtcatcgcttccccggcttcctgtgcgaagcgcgggctgaagccggcgtcgcgggccaggttgatcaattgggcatagaggccgctgccatagctgcgcggaaagaatacaaacggctcctcagacaactgtgccaagtgcaagccacgctcgctgccttcgaccaaagggtgacccgcgctcaatacggccactaaaggttcgcgcatcagttcgatgacacccaacgaatccggcaacggcagcgggcgcatcaagccgacctggatcgtctcatccaccagcgactctgcgacttcggtgctgctcatttcttgcagattcaggtgtaccgccggaaaggcctggcgaaaggcaaaaatcgcctggggaatactggcgttgaatggcgctgacgacgtgaagccgatcttcagctcgcccaactcacccaattgcgcacgccgtgccacatccgacgccttgtcgacctgcgccaacaccaaccgcgcctcgtgcaggaacagccgccccgcctcgctcaactcgacccgacggttggtccgctcaaacaaccgcgcgcccacctcttgctccagggcctgaatctgctggctcagcggtggttgagagatgcccagcacctgtgcggcgcggccaaagtgcagctcttcggcgacggcaatgaagtaccgcaagtgtcgtaattccatgcaagcctcattaggtcgtaagacctatcaaacaggtcgaacaatatattggaaagaatcattaggcagctatattctttttgcagtgccagtcctggccggcttttcctccccgaggtccccgtgaaatctgctgtcgcgccattcgctcaaaaagtcccgcccaccgctttggatgaggtggtggcccagctcaatgacgagtacatcgaaaaaggcacaccgatgttcatgcgcacggtgctggcgttgttctccggcggttttgccacctttgcgttgctgtattgcgtgcagccaatgatgccggcgctgtcccacgagttttccatcaatgcggcgcaaagcagcctgatcctgtcggtggccacggcaatgctggcgttgggtttgctggtcaccggcccgatttccgaccggctggggcgcaagccggtgatggtcgccgcgctgttctgcgcggcgctggctaccatcgccagcggcttgatgccgacgtgggaaggcatcttgctgatgcgcgcgctggtggggctgtcgttaagcgggctggccgccgtggcgatgacttacctgagtgaagagatccacccgcaacacatcggcctggccatgggcctgtacataggcggcaacgcaattggcggtatgagcgggcgcttgatcatcggcgtgctgatcgactttgtgagctggcacaccgcgatgctgatcatcggcgccctggcgttgatcgcggctacggtgttctggaaagtcctccccgaatcgcgcaacttccgcaccagcagcctcaatccgcgcaatctgctgaacgggttcgtcatgcatttcaaggatgcgggcctgccgtggttgttccttgaaggcttcctgctgatgggtgcctttgtcacgatgttcaactacatcggctatcgcctgttggcgcaaccctacgggatgagtcaggccgtggtcgggctgctttcgctggtgtacctgaccggcatctacagctcggcgaaaatcggctccctggccgaccgcctcggtcgtcgtcgcgtgttgtggggcaccattgtgctgatgctcgccggtatggcgctgactctgttcacgccgctatggctggtggtaccgggcatgctgatcttcacgttcggcttcttcggcgcccactcggtggccagcagttggatcggccggcgcgcagtgaaggccaaggggcaggcgtcgtcgctttacctgttctgctactacgtggggtcgagcattgcggggacggcgggcgggttcttctggcactttgccgggtggaacgggattggcgggttcatcatcgcactgctgatcggcgcgttgctggtggcgttgaagctggcgaagctggcgccgctgggagaagtgaaggcctgatgcagccctgctttaatgtgggagctggcttgcctgcgatagcaatggtgaattcaccatcgccatcgcaggcaagccagctcccacattgttttgcgtgttattcgtggtactgcgcagacagctcatgcaccgcacgcaagaacgcccccgcatgctccgggttcacttccggcgtgatgccatggccgaggttgaacacgtgcccggtgcctttaccgtagctggcgaggatgcggccgacttcggtgcggatcgcttccggtttggcgtacagcacggtcgggtccatgttgccttgcagcgcgacgcggttgcccacgcgctggcgggcttcaccgaggtcgcaggtccagtccaggcccagggcgtcggcaccggcatcggcgatgctttccagccacaggccaccgcccttggtgaacatgatcaccggcactttacggccttcgtgctcacggatcaggccgctgacgattttgcgcatataggccagggagaattcctggtacgccgccgccgacaggttgccaccccaggtgtcgaaaatctgcacggcttgcgcaccggccatgatctggccattcaggtaagaggtgaccgactgcgccagcttgtccagcagcaggtgcatagcctgtgggttgtcgtagagcatggccttggtcttgcggaagtctttcgacgaaccgccttcgaccatgtaggtggccagggtccatgggctgccggagaagccgattaatggcacacggccgttcagctcgcggcggatggtgctcacggcgtccatcacgtaaccgaggtctttgtgcggatccgggatcggcaacgcttcgatgtcggccagggtgctgacgactttcttgaagcgcgggccttcgccggtttcaaaatacaggccctggcccatggcgtcagggatggtgaggatgtcggaaaagaggatggccgcgtccagttgtgggtagcggtccagcggctgcatcgtgacttcgcaggcgaactccgggttcatgcacaggctcatgaagtcgccggcgttggcgcgactggcgcggtattccggcaggtagcgaccggcctggcgcatcatccacacaggggtgacgtccacaggttgcttgagcagggcacgaaggaaacggtcgttcttgagggcagtcatgtcggcatccgcaaaaaaagtgcgggcattttctcagagccagacgcaaaaggcacggaatgcgccgtgccttttgtctatcgggtcaatttgtcgcaatgagtggcgccgcaaagcccaatgtggactggggtttgtgtgggagctggcttgcctgcgattgcggtggttcagtcgatacatccggtgactgttacatcgctatcgcaggcaagccagctcccacattttgatcccatttcaagttgggatcggggtcagacctgcaggtaatccaggattccttcggcggcgttgcggccttcgaagattgccgtcaccaccaggtcagaaccgcgcaccatgtcgccaccggcgaagattttcgggttgctggtctggtgcttgtactggccctgttccggggccacaacgcggccctggctgtcggtctgaatctggaactgctcgaaccacggcgccgggcttgggcggaaaccaaaggcgatcaccacagcatcagccgggatgatttcttcagaacccgggatcggctcggggctgcgacggccacgggcgtccggttcgccgagacgggtctcgaccaccttcacgccctcaacgcggtcttcaccgacaatggcgatcggctggcggttgtagaggaacttcacaccttcttccttggcgttcttcacctctttgcgtgagccgggcatgttggcttcgtcacgacgatacgcacaggtcaccgacttggcgccctggcggatcgaggtacggttgcagtccatcgcggtgtcaccaccaccgagcaccacgaccttcttgcctttcatgtcgacgaaatcttccggcgacttttcaaagcccaggttgcgattcacgttggcgatcaggaagtccagggcgtcgtaaacgcccggcaaatcctcaccggcaaagccgcccttcatgtaggtgtaggtgcccatgcccatgaacacggcatcgtattcggcgagcagttgttccatggtgatgtctttgccgatttcggtattgagacggaactcgatacccatgccggtgaacacttcacgacggttgctcagtacggttttttccagcttgaactcgggaatgccgaaggtcagcaggccgccgatttccgggttcttgtcgaacaccaccggagtcacgccgccacgcaccaacacgtcagcacagcccaggccagcagggccggcgccgatgatcgcaacgcgcttgccggtcggcttgaccttggacatgtccgggcgccagcccatggcgaacgcggtgtcggtgatgtacttctccaccgaaccgatggtcaccgcgccgaagccatcgttaagggtgcaggcaccctcgcacagacggtcttgcgggcacacccggccgcagacttccggcagggtgttggtctggtgcgacagctcggcggcggcgaggatgttgccctcggccaccaacttgagccagttgggaatgaagttgtgcaccgggcacttccattcgcaatacgggttaccgcaccccaggcagcggtgggcctggtcggccgagtgctggggtttgaacggttcgtagatttccacgaactctttcttgcgttgacgcaacagtttcttcttcggatctttgcgcccgacatcgatgaactggaagtcgttattcagacgttcagccatgttaaaacctcatcaaactgttcaggcgcatatcactgcgggttggcacggatgctggaaagcaacgatttcaggttggcagccttgggcttgaccagccagaaacgacgcaggtaatcatcgaggttttcggcgaggttacgaccccattcgctgccggtttcctcaacgtactcgtccagcacgtgctgcaagtggttccggtaggattccatggcttcgccgctgatccgctggatctcgaccaactcgtggttgaccttgtcgacgaaggtgttgtcctggtcgagcacgtaggcgaaaccgccggtcatgcccgaaccgaagttgtaaccggtcttgcccagtaccgcgacaaagcccccagtcatgtactcgcagcagtgatcgccagtgccttccaccacggtgtgagcaccggagttacgcacggcgaaacgctcaccggccgtaccagcagcaaacaacttgccaccggtggcgccatacaagcaggtgttgccgatgatggcactgtcctgggtcttgtagacgctgcctttaggcggaacgatcaccagcttgccgccagtcatgcccttgcccacgtagtcgttggcgtcgccttccaggtacatgtgcaagccaccggcgttccatacgccgaagctctggcccgcagtgcccttgaagcggaaggtgatcggcgctttcgccatgccttggttgccgtgcttgcgcgcgatttcgccggagatgcgtgcgccgatggaacggtcgcagttgcagatgtccagggcgaattcgccaccgctggcctcaaagatcgaggagctggccatctcgaccatcttctcggccagcaggcctttgtcgaacggcgggttgcggtccacctggcagaattgtggcttgtctgccgggatgtgatcgctgcccaacagcggcgtcaggtccaggtgctgttgcttggcggtctggccttcgaggatgtcgagcagatcagtacggccgatcagctcttccagcgaacgcacgcccagtttggccagccactcacgggtttcttcggcgacgtaggtgaagaaattcaccaccatgtcgacggtgccgatgtagtgatccttgcgcagcttctcgttctgagtcgctacaccggtggcgcagttgttcaggtggcagatgcgcaggtatttgcagcccagagcgatcatcggcgcagtaccgaagccgaagctttcggcgccgaggattgcggccttgatcacgtcgaggccggttttcaggccaccgtcggtttgcacccggactttgccgcgcaggtcgttgccgcgcagggtctggtgggtttcagccaggcccagttcccacggtgcaccggcgtacttgatcgaagtcagcggcgaagcgccagtgccaccgtcgtagccggagatggtgatcaggtcggcataggccttggccacaccggcggcgatggtgcccacgccggcttctgctaccagtttcaccgagaccagcgcctgcgggttgacttgtttcaagtcgaaaatcagctgcgacaagtcttcgatggagtagatgtcgtggtgcggcggtggcgagatcagggtcacgcccggcacggcgtaacgcagcttggcgatcaaaccgttgaccttgccacctggcagctgaccaccttcacccggcttggcgccctgggccaccttgatctgcagcacttcggcgttgaccaggtattccggagtcacaccgaaacggccggtggcaacctgcttgattttcgagctcttgatggtgccgtagcgcgccgggtcttcaccgccttcgccggagttggaacgcgcacccaggcggttcatggcttcggccaacgcttcgtgggcctcaggcgacaaggcgcccagggaaataccggcggagtcgaagcgcttgaggatcgattccaatggctcgacttcgttgatgtccatcgccgtgtccagggtcttcactttgaacaggtcgcggatcatcgacaccgggcgattatccaccagcgcggtgtattccttgaacttggcgtagtcgccctgctgcacagcggcttgcagggtgttgaccacatccgggttgtacgcgtggtattcgccaccgtgcacgaacttgagcaggccgccttgctggatcggcttgcgcgcgctccaggcttcggctgccagggctttctgttcggcttcgatgtcgacgaaacgcgcgcccttgatgcggcttggcacgccacggaagctcagctcacagacttcttcggacaggccaatggcttcgaacaattgagcgccacggtacgaggtgacggtggagatacccatcttcgacaggatcttcagcaagcccttggtgatgcctttacggtagttcttgaacacctcgtagaggtcgcccagcacttcaccggtacggatcaggtcgcccagcacttcgtacgcgaggaacgggtacaccgccgaagcgccgaaaccgatcagcaccgcaaagtggtgcgggtcgcgggcagtagccgtttccacgaggatgttggagtcgcaacgcaggcctttttcggtcaggcggtggtgtaccgcgccggtggccagggaggcgtggatcggcagcttgcctggggcaatgtggcggtcggtcagcacgatctgggtacggccggcgcgcacggcttcttcggcctggtcggcaacgttgcgcaccgcggcttcaaggccaaggctctcgtcgtagttcaggtcgatgatctggcggtcgaagcctgggcggtccagggtcatcaacgagcgccacttggccggggacaccacaggcgagctgaggattacgcgggaagcgtgttcaggcgactcctggaagatgttgcgctcggcaccgaggcacacttccagcgacatcacgatggcttcacgcagcgggtcgatcggcgggttggtcacctgggcgaactgctggcggaagtagtcgtacggcgtgcgcacgcgctgggacagcacggccattggcgtgtcatcgcccatggagccgacagcctcgtagccttgctcgccaagcggacgcagcacctggtcgcgctcttcgaacgtgacctggtacatcttcatgtactgcttgagctggtcgacgtcgtagaaagccgaaccgtggtcgttgtcttccatggtcgcctggatgcgcagggcgttcttgcgcagccattgcttgtacgggtgacgcgacttcaagcggttgtcgatggcgtcggtgtcgaggatctgcccggtttcggtgtccacggccaggatctggccagggcctacacggcctttggcgatcacgtcttcaggcttgtagtcccacacgccgatttccgacgccagggtgatgaagccattggtggtggtgacccaacgcgccgggcgcaggccgttacggtcgagcaggcacacggcgtagcggccgtcggtcattacgacaccagccgggccgtcccacggttccatgtgcatcgagttgtactcgtagaacgcacgcaggtccgggtccatggtttcgacgttctgccacgctggcggaatgatcatgcgcacgccacggaacaggtcgatgccaccggtgaccatcagctcgagcatgttgtccatgctggaggagtcggaacccacgcggttgaccagcgggccgagctcttcgaggtccatcaagtcgttggcgaacttggtgcgacgggccacggcccagttgcggttgccggtgatggtgttgatctcgccgttgtgggcgaggaagcggaaaggctgggccagcggccatttcggcagggtgttggtggagaagcgctggtggaacacgcaaattgcggtttgcaggcgctcatcgctcaggtccggatagaaggcggtgaggtccgccggcatcatcaggcctttataaatgatggtcttgtgcgaaaagctgcagatgtagtggtcagtgtccgcggcgttcgacaccgacgagcgacgacgggaggtgaacagcttgatcgccatgtcctgatcgctcaggccatcgcctgcgatgaacacttgttcgatctgcggcagacgctccagggccaggcggccgagtacgctggtgtcgattggcactttgcgccagccgaccagttgcaaaccggcagcgacgatttcgcggttcatgttttcgcgagcggcttcagccttaaccgggtcctggttgaagaacaccatgcccacggcgtattgcttgggcaggtcgactgcaaattgctcttttgcgacagcgcgcaggaacaggtcgggcttttgaatcagcaagccacaaccgtcaccggtcttgccgtcggcgttgatcccaccgcggtgggtcatgcaggtcagggcctcgatggccgtttgcaaaagggtatgactgggctcgccctgcatgtgggctatcaggccgaaaccgcagttatccttgaattcatcgggttggtacagacctgctttcatagacactttctcaccaggctgcctcttatgacgaggcaaatttcttttcaattcaaccggttaccttccacgccgaacgtacgccggcttagcgggggcaaaagggaggtcattgtacacaccgacacagacgctcacaaatttagcgacgaaatgtcgcaaatctatgtcgcatttatgaaaggtttaaagcgatatgctgtgctagtcaaaacttttttaattccgaccgctacgactcaaaagctactgtgacgcagacaccacaaagcgcgcggtctctagagactgcacgcacttgcggttattttttgaggtgccgggagggcagcctgggtaaggccgccgaatcttcagcgagttgttgcgagttcttgttgaacgctggcaacagtgcgaggccaaggtttaccagcctgaaccttcgctggcaaggctttgatcgcggaatcggctgcggcacggcttgggaagctgccgtaggtgatcacgtagagaggcttgccgttgagcactttcttgaaataacggtactcgccgccctgctctttcacgaacgcttgagcgttggcttcggagctggtgccaagaatctgcaccacaaagtggccggctggctggctggtgtaccagctgctgccagcggcggcaggcgcggcggctttggcgacaacggcaggtttttcagccggcttggccgctggagccggcttggcgactggcgcaggtgcaacgggcttggcgacgggtgccggcttggccgtagcaacggtcggcgccggggtcggcttggcaaccggggccggctgaccggctggcacgcccgcaggcggcgcggtggtggtcacggtcggcggtgtagcgctggagccttccaccggcacgccgtcatcgccttcggagatgccaccggcttcttcggcgagcgggccgcgcatcacaggctggccgaccatcggcaggttggtcggctggccggagttggcgaactcgacgtttggcgtgggcttgcccagtggcaactgcgcctgttcggttggcgcgccggcagtcgtgggtgccttgctgcgacccgggatcaaccaggcggcggcgacagcgaccacgacaacggcggaaatcgccaatacgtgcttcttaggcatagtgaaccccatctttggacgcttcaccgcagagcggctggcgatcatggcttcgatcaaggcatcgcgggcaacctggttgatggtgccaggccagccgcctgcgctttcgtgaatatcagagatctgatttgcagtgaaaagttcgatacccgcacccgcaccctcaaggcgttgagccaggtattcgcgggtttcttcttcttcgtacggctgcaattcgatgacgtgaaacagctcctgttcgccgctgatctgctccagatcggcaatcagcgaagactcaccaaacaggaacacgtgcgggcggccttcgggcgtacctgccgccagcgccagcagggcttccagagcggattcgtcgagctgctcggcgtcatccaccagcaggtagacttcctggccggtcaagcccagctgtaccacttgcttgaggatcgcgttcggctcggcggtggccacgttcagggcctgggcaacctggcgcaacacgcctgccgcatcaccggcgccacgggccgagaccaccacgctctgcaccgactgcttgttggtgctggcgacgagcgcctggcgcagcaaggtcttgccgctgcccaacgggcccgtcaccaccagcagcagttggctgtagcgcgccagatggtgcagctggccaagcaccggcttgcgctgggcggggaaaaatttgaagcccggcacccgtggagcgaaagggtcgtggcttaactggtaatggccgaggaacgcctcgtcggcatgcaaactagtcatcgggatcttattaacctttaagctgggccagggcgcggtaatccgctcccagcgtggcctgtaaaatctctttcggataatcgtcggtcactaccgcttcgccgacgtggcgcagcagcaccagtcgcaggcgaccgtcgatcactttcttgtctattgccatatgttcgaggaaatccgcctcggtcatctcctcaggcggaatcaccggcaagccggcgcgctggaacaggcggataccgcgatcccgttcctgggcgctgatccagcccaggcgctgcgacatgtccaatgccatcacagtgccagccgccacggcttccccatgcaaccacacaccatagcccatgtgcgtttcgatcgcatggccgaaggtgtggcccaggttcagggtggcccgcacgccggactcccgctcgtcggcattcaccaccagcgccttggcggcgcaggaacgggaaatcgcttcggtgagggccgcctggtccagattgcgcaaggcgtccacatgctcttccagccagctcaggaacggctcgtcgcagatcagcccgtacttgatcacttccgccagccccgccgacagctcgcgcggcggcaaggtgttgagcgtcgcagtgtcgatcaatacggcctggggctggtagaacgcgccaaccatgttcttgcccagcggatggttgatgccggtcttgccgcccaccgacgaatcgacctgggacaacagggtggtcggtacctggataaagtccacgccgcgctggtagcaggcagctgcaaagccggccatgtcgccgatcacaccgccgcccagggcgatcacggtggtgcggcggtcatggcgcgcagtgagcaggccgtcaaagatcagttgcagggtttcccaattcttgtgggcctcgccgtcgggcaggatcacggaaatcaccgagtaggccgctaggctgcggctcagacgctcaagatacagtggcgcgaccgtttcattggagatgatcgccacttgccggccggcaatgtgcggtgcgagcaactcgggctggtccaatagaccttcgccaatatggattgggtagctgcgctcgcctagatcgaccttaagtgtctgcatgtgtccccgcgtgaagatgtattgacgatcggcaactcggatgtgacgtcgcctgatggctctgcgccacactcggcagagcaatggcgcgccgccgagaatagcgcatttcgggccgggctttaacggggtggcaactgctgcaagcgctcaagaatgtcgagaacgaccattcggggcggccgctcatcggtttccaccaccagatcggcgatttcccgatacagcgggtcacgcagcgtcagcaaatcccgcagggtctttgccgggtcggcggtgcgcagcagcgggcggttgcggtcgcgagcggtgcggcctacctgctgctcgaccgacgcatgcagataaaccacacgacctccggcatacagcgcccggcggttttcatcgcgcatcactgcgccgccaccggtggccaataccacgccgtcgcagccgcacagctcggcaatcatcgcctgctcgcggtcgcgaaagcccagctcgccttccttatcgaagatccatgggatattggcgcccgtgcgcaattcaatttccttgtcggaatctttgaacggcaggcgcagctctttggccagcaaacggccgatggtgctttttccagcccccatcggtcctacaagaatcaaatttcgcacagaatcaacgactcacagcaatcgcctggttattcataatacgcggagtgaggaacaccagcagctcggattttctctgcgccacaacatcacgccggaaaaggcggccaagatacggtacatcgcccaaaaatggcactttatctaccactttgctttgggtatcggagaaaaccccgccgatcacgatagtctcgccatccttgaccaataccttggcgttgacctcgtttttcttgatcggcggcacatcgttgagtttattcaggtagtccggctcgtccttggttacccggacctccatgatgacgtggtcatcgggggtgatttgcggcgtgacctccaatgacagcgaggcctctttgaacgacaccgacgtagcgccctgggaggtggactcctgatacggaatctcggtgcccttgagaatgcgcgcggtttccttgtcggacgtgaccactttgggctgcgagacgatttcaccgttaccggacttctccatggcggtcagttccagatccagcagcaggttgtcggtgataaaggcgaggcccagcccggaagtaccggtcagcgaacccaaatcgacaaatggcgagctggccgggctttccggcggctcgacaccttcggccaagggcttgccgatccccccggcgccccagttgccacggttgagccgccctccccagcgcacgcccaggtttttgtcgtagtccacgttggcttccacgatcctcgcctcgatcatcacctggcgcaccggaatatccagttgcgccacaatccgccgcagctcttcaagccgctcgccggtctggtaggcgatgatgttgttggtacgatcatccaccgccaccgagccgcgctcatcggtaacaccttcaaggcccgtcaccgattggaacaacttggccagatctgccgccttggcgtaattgacctgcaacagctcgcgacgcagaggcgcaagctcggccatctgcttgtttgcctccagtgtcagcaactcacgagcggccagctcatcagccggcgccaccaacagaacacccgcttttacacgtttatccagccccttggcttgcaacaccaggtccagcgcctgatcccacggcacatccttgagccgtagggtgatcgagccctgcacctcgtcactggccaccaggttgaggccggccacgtcagcgatttgctgcagcaccgcgcgcagttcgatgttctggaagttgagggtgagtgtgtcgccggtataggcgcccgaaactgcgttgccaggaggcggcagctgaatcaggtccacgcgattgggcacagcaaaggccatcggtgccgtgaacgctatccatagcgccacaccgaaggacgagaaagtccttttcatttgtcttattccgttatgagttgacgttcagcacgagggttcgcgagcgctccagccatgcgccctgttcatcgggaaacagttcagccaattcgacatgaccatcgtgaatagccgtgacccgaccgtggttcgggcccaggtagtcgccgacggcaagccggtgcactgttgaaacggcccgcagcagtgcaaaacgctgcaccccacgggacagtgtgccgaccatttcgaattgatcgacagccaggccttcaagagcgctgcgctgtcgagtgaggtcaggcgccggggcgggccggcccgacactggctcggcctgcatctgaagcggccgaaacgggtcgcgcaaagaggagggggcgtaggcaatgcgggtgtccggctcgacaaccccgccaccctgcgaggcactccgataagccttcgccagcatctcaagacgcagcaccgccccatccgaccgaagtgcaacatcgtgcacggtgaccattcgcgagagcccgcccaaagccttcacgaacgccgccagatcgtgaaaagtaccgctggcgccaatctgcaggggctgttcaacataaaacggctgaggcagttcatccatcacggtgatgctttgaaccgccaggccattggcaattgccagccgtgcaagatcctccagcaaaccaggtatctggccctcacccgacagttgcaatgaaagctgcgccgcttttgcctgagccaactcgaattggctggtgcgcgcttccaggccagcagacaacccggttttttccatgaattgctgttgcagcaccgcttcctgcgcctccaacgcttgcaaccgctctcgtgacgggctcaggagcaaaccattgcccatcccccacacgaaacccgccaacacacaacccagcagggccttgcccggcaggggccattttgcagcgttgtgagagagcgagtagaagtcgagcctgggcaggctcatggctgcgcctcggtggattccccctgacgcaccatcaattgaaattcgttggcgccctgctcggcatccgcccgcacatgctgcaactgcgtcgcgtgagtgccttgcgtggcctccagacggcgcatcagttgggcgatatcctggctggattgcgcactgccgctgacgctgatcgtatcgcccttggccactacctcatgcagatgaacgccctcgggcaccgcgcgggccaactgatcaaacattttggcgctggaagaacgcgcatcgtgcaggtcctgcacgactttcatacgctcggccaattgctggctctgctcttgaatatcgtcgatggtcttgatgcgtgaatcctgaacggcgatgtccttgcccacatggctattgcgcgtcacttgccggtcgatcgctcgatcaatcacttgatcggccagccacaccgccgcaagcgcaacaccgccgaacgccagcagaaatatcaggaagtatttgcgtcgccgttccgcctgggcctggcgccaaggcaaaagattgattcgtgtcattacgcgaaactcctcagggccaacccgcaagcaattcccatcccttgggcatccacggcccattgtgtgccatcgactcgatagcccggcgtgaagctggcgaaatcctgactgcaagcgcgctccaatgcaaacccttctacatccaccacccgcgcgacaagccccgccagcgccaaaaccgcctcgcgggactcgacctgcgccttcaggcacgctgccagcatgacctcgacccgcgccgagtcccgggccgaagggccgcacacctgaaaatcgatggcaacgtcctccaatgggtagggaatatattggtcagcttccatctgtatcacccaagccatttcttcgtcactcaagcctgcctccatttcgatcacccgcgtgatgacagagggccccgcgaccgcaatcgccgcctgccgggcggatgtgtgcaagcgcgacaatgcctgaagcaacgcctgaccgataccttgcaggtccagcaacgtgccatcgactaccgcatgcgcagaaagcggctgcgtggcatagctttcgacggtatatccaccggctgaacggcccagctcgatcagcttgatgcccgtgtcattgatatcgacacccagaacagtgtcggcttttcgcctgaaaaatccctttaccataaaactccccaaaactttgcctgtcataccgcctgattgccgccgggcgaggtgcattcggtcgacttgtttgagccccgcgaatgacgcctaaggccgaaaatgctttaatgcccagcgttttttcccgctttttatctgctgctcgggtcgatccatcgtttgccatgcatgccccgacgcctaactcattcttttctctggaaatccaaaagccttgattcgtctgctgaagtttttcgggtactccattgtcgccatcgtttgcgggttgctgctcgtactcagcggtgcatacctctaccttagtccgggtttgccctccgtagaggcgctcagaagtatccagttgcagattcctttgcgggtctacagcagcgatgaaaaactgatcgcggagttcggcgaaatgcgccgcacaccgatccgtttcgccgatattccgcccaatttcatcaatgccctgctgtcggcggaagacgacaatttcgccaatcactacggtgtagaccccagcagcctggtgcgtgcggccactcagttggtaaaaagcggacacattcaatccggcggcagcaccatcaccatgcaggtggcgaagaacttcttcctcaccagcgagcgcagcttttcgcgcaaggccaccgaaattctgctggcactgcaaatcgaacgtcagctgaccaaggacgaaatccttgagctgtacgtgaacaagatttacctgggcaaccgtgcctacgggatcgaggctgcatcccaggtttactacggcaagtcgattcgtgacgccagcctggcgcagatggcaatgattgccggcctgcccaaggccccttcgcgcttcaacccgctggccaacccggcgcgcagcaaggagcgccgcgactggatcctgggccgcatgtacaagctgggcaagatcgaccaggccgcttacgaaagtgccgtagccgaaccactgaacgccagctaccacgtgccgacaccggaagtgaatgcgccgtacatcgccgaaatggcccgtgccgagatggtcggccgttatggcagcgaggcttacaccgaaggtttccgtgtgaccacgacggtgccgagcgacttgcaggaaatcgccaacaactcagtacactcaggcctggttacctacgaccagcgccacggctaccgtggcccggaatcgcgcctgccaggcaaaaccatgagcgcctggaccaccgaactgggcaagcaacgcccgatcagcggcctggagccggccatcgtcacccaggtgaagaaagatggtgtgcaagtgctgacccgcaccggtgaagcgcatgtgagctgggacagcatgaagtgggcacgcgccttcctgaacaccaacagcatgggcccgatgcccaagcagccctcggacgtggcacaggtgggtgatttgattcgcgtgcaacgccagaaagacgacagcctgaaattcagccaggtgccactcgcccaaggcgcgctcgtttcactcgacccacagaacggcgccattcgcgcgctggtcggcggttttgccttcgagcagagcaactacaaccgtgccacccaggccaagcgccagccgggttcgagcttcaagccattcgtctacagtgctgcgctggacaacggctacaccgccgccagcctggtcaacgatgcgccgatcgtgttcgtcgacgaatacctggacaaggtctggcgcccgaagaacgacaccaacaccttcctcggcccgatccgtattcgcgaggcgttgtacaagtcgcgcaacctggtgtcgatccgcttgctgcaagcgatgggcgtgggcaagaccatcgattacatgacgcgcttcggcttcaataaatcggaccttccgccaaacttgtccctggccctgggtaccgcgacccttacgccgatggaaatcgccaccggctggagcacattcgctaacggtggttacaagattgcgccgtacctgatcgacaagatcgaaagccgcaatggcgacaccctgttcaccgccaacccgccacgcgtgccgggtgatgtggtcaacggcgtagcggctcccgacgggattgcggcacccaccaacggcggcatcaccatcaacccgaccccaggcacagtgcctgccgcaaacgccaccgcccccgccgagccacaagcgccggcagtcgcagagcgtgttgtggatggccgcaccacctacattctcaacagcatcctggaagacgtgatcaagaaaggtaccggccgccgtgcactggccctgggccgtgccgatattgcgggcaagaccggtaccaccaacgattccaaggacgcctggttctcgggctacaacggcgattacgtgaccaccgtgtggaccggttacgaccagccggaaagcctgggccgccgtgagttcggtggcaccgtcgcgctgccgatctggatgagctacatgggcgcggccttgaaggacaagccgctgcacacccaagccgagccggaaggcatcctcagcctgcggatcgacccggtgagtggccgtgcggcttcgccaagcacgccgaacgcgtacttcgaactgttcaagagcgaagacacgccaccgtcggtcaatgaactgggtaacggcgtggcaccgggcagcccgctgccggcagatgaggcggcgccgatcgacctgttctaacccgatctgcgggaaaacgcagatccaatgtgggagctggcttgcctgcgatagcggtctacctgatacaccgccatcgcgggcaagcccgactcccacagggtttatccggcgccctatgaccgtggacaccagccacaaaaaagccccggctcgcgagagccggggctttttgttggtgcgctacaacggcttagccgttgaacacatcatccacgctcttgagcgggtagtgcttcggatacggcagggtggccacgccggtctcgatggcggctttggccacggcatcggagatcagggtgatcaggcgcttatccattggtttcggaatgatgtactcacggccgaattccagcttgataccaccgtaggcgtcgcacacttcctgaggtaccggcagcttggccagttcacgcagggcgttggcggcagccactttcatctcttcgttgatgcgcttggcgcgaacgtccagggcgccacggaagatgaacgggaagcccagcacgttgttgacctggttcgggtagtccgaacggccggtggccatgatcacgtcgctgcgcgtggcgtgagccaactcaggcgagatttccggatccgggttggagcaggcgaacacgatcgggttggccgccatggatttcaggccttcagcgctcagcaggttcgggccggacaggccaacgaacacgtctgcaccgtcgagagcgtcagccaggctgcgcttgtcggtcgcgtgggcgaacatcgccttgtactggttcaggtcggtacgctcggactggactacgcccttgctgtcgaccatgaagatgttttccagcttggcgcccatgctcaccagcaacttcatgcaggagatggccgcagcgccagcgcccaggcagacgatcttggcgtcagccagggttttgccagcgatttccagggcgttgatcatgccggccgcagtaacgatcgcggtgccgtgctggtcatcgtggaataccggaatgtcgcactgttcgatcagggccttttcgatctcgaagcactcaggtgccttgatgtcttccaggttgatgccaccgaaggtgatggagatacgcttaacagtgtcgatgaaagcctgcgggctttcggaatcgacttcgatgtcgaaaacgtcgatgccggcaaagcgcttgaacagcacgcctttaccttccatgactggcttggaagccaatgggccgaggttgcccaggccgaggatcgcggtgccatcggaaatcactgcaaccaggttgcctttgccggtgtacttgtacgccagttcagggtcgcgggcgatttcacgtacgggctcggcaacgccagggctgtaggccagcgacaggtcgcgagcggtggcagtggctttggtgagctctacactcagctttcctggacgaggatgggcatgatattcgagagcggcagttttcaaatcagacatatcggcattccgcttttactgttggtcgacggaccgccgaggatacgcgtgtcgcaaagtccctacaagactgggcagtcacaggtgtcaagggccctgcgctacgacttttggccaagagccacgggatacaagggctcaactgttcacaatcaacttaaaaaatgtctacaattttttcttcaaagccgacttattgagctgccgatcaaatcctgggtacaaaaaaggcgtccacaagggacgccttttttatcagcatggaaaaccgcagctttccaggttgatcggccttaggcctttttggcaccgaaagcaccgaaacggtcagcaaagcgctgtacacggccgccggtgtccagagttttctgcttaccggtgtagaacgggtggcactcgttgcatacgtcagtacccagtggcttgcacaggttcgaacgggtttcgaacttgttgccgcagctgcaggtaacttcgatggtttcgtacgctggatggatatcggctttcatggtgacttcctcgggctagcgtgccgccactcgacactattgtcgaataccgcacgtaattaggccgcggattctaccagacctttttaaacgcgcaagcggcgcttaagctaccaaaccccctttcatcagaaaactatcggctctccacaatccatgtgggagccgggcttgcccgcgatggcggtgtgtcagacacctaatcctgtgactgataaaacgccatcgcgggcaagcccggctcccacacgagccagcggcttgcacccgacacgggacacccccaccgcaggtctgctaggctcccgcccctgcaccatcacctgcctttatagatgagacccccgcgtgcccgacgccattttgcgcctagccctgccctcgcccctgcgccgcctgttcgattaccgggccccggccggtgtgctgcgggcacagttgcagccgggcatgcgcgtacgggtgccgttcgggcgccgggagatgatcggcattctggtggaagtcgccgaccacagcgaagtcccggccgaaaagctcaagcccgcactggccattctcgacgccacgccgccactgccgcctgcattgttcaagctgtgcctgtggacggcccagtattaccagcacagcctgggcgataccttgagctgggcactgccggtgctgctgcgccagggcgaattggccgaggcacgccaggaacgcttttggtcgaccgtgcccggcgcccgcctcgatgacccgcgcatcgcccgcgcgccgcgccagcgtgaagcgttggcaaccctggcgcagcacccccacggcgtggctcatcaactactcagcaaactgatgctgagcaaggacagcctcgacctgctgctcgccaaaggcctggtccaggtggaaatccgcaagcacgcccccgacccgcgccaccaacactggctggcccagccggaattgccgctgaaccccgagcagcgcgcggcctacgaggccattcgcgccggtttcgacagtttccacgcattcctgttggctggcgtgaccggcagcggcaagaccgaagtctatttgcaactgatccgcgaaaccctgcaagccggtaaacaggcgctggtgttgatccccgagatcaacctgggcccgcaaaccctggcgcgtttcgagcagcgcttcaatgcgcgcatcgccctggtgcattcggcggtcaacgaccgcgaacgcctggagtcctggctggccgcgcgggatggtgaggccgacattattatcggcacccgctcggcgctgttcaccccgatgaaaaaccccgggctgatcatcatcgacgaggagcacgacggttcctataaacagcaggaaggcctgcgctatcacgcccgcgacctcgcactggtgcgcgcacgccaggaagacatcccgattgtgctgggctcggccacgccctccctggaaagcctgcacaacgcctacaccggccgttatggcctcctgcgcctgaatgagcgcgccggcggcgccaagcagccacgtttcttgcgcctcgacgtgaaaagccgcccgctcgacagcggtatttcagggcccatgcagcaagcaatcggccaaaccctcgccgccggccagcaggtcctggtgtttctcaaccgccggggttttgcgccgacgctgctgtgccacgactgcggctggatgtccgaatgcgaacgctgcgatgcgcgcatgaccgtgcaccaacgccatggcgagttgcgctgccatcactgcggccatgtagaacgcacgccgcgccattgcccgcaatgcggcaaggttgacctgcgccccgtgggcgcaggcaccgaacgagcggaagagcgtttgggcatcctgttcccggactacccggtattgcgcgtcgatcgcgacagcacgtcgcgcaaagatgcgatgaaccaactgttcgccaccattcagaaaggccagccgtgcatcctcatcggcacgcagatgcttgccaaagggcaccactttccaagggtgacgctggtgtcgatcctggatgccgatggcggcctgttttccggtgacttccgcgccagcgagcgcatggcgcagcttatcgtgcaggtcgcaggccgcgccgggcgtgccgaagagccgggcaaagtgattatccagacgcatctggccgaccaccccttgctgattcaactgacagaacagggctactttgccttcgccgagcaagccttgagcgaacgccgctccgccggcctgccgcccttttcgcatttggccttgctgcgcgcggaagcccacaagcccgggcaagccgaaagttttctggatgaagcctgtagcgccgccgaaggtttgctggccgaattggggctgaccggcatcgaattgctcggccccgtgcccgcccccatggaacgccgtgccggtcgttatcgcgctcagctactcttgcaggcaacatcccgtgcgccattgcatcggctattaagtagctggttgcttgccctggagcaaatgcccggcggccggcaggtgcgatggtcgctggatgtggaccccgtagatttgtattgatagaaattgccttatcgcaggcaagccagctcccacatgtagaagtattcacccattgaaatgtgggagcgggcttgcccgcgatgaggcccgcaggtctaccaacccgtctgaacggttggcaagcccgccctcgccacggataatgcccagtttttccacctgcgcatcgcgcgccgccgcttgcggtcgaaagagaacaccatgaaagacaccattcgccagctgatccaacaagccatcacccaactcgtcaacgaaggtgtgttgcctgaaggcctgtcgccggcgatccaggtggagaacacccgcgacaagacccacggcgacttcgccagcaacatcgcgatgatgctgtccaagccggctggcatgaagccgcgcgacctggcggaaaaaatcattgcggcgctgccggccgacgaaagcgtgaccaaggccgaaatcgccggccctggcttcatcaacttcttccagaatacccaggccctggcttcacgcctggatgcggccctcgccgacgccaggatcggcgtgcgcaaggctggcccgcagcaacgcgtggccatcgacctgtcggcgccgaacctggccaaagagatgcacgtaggccacctgcgctccaccatcattggcgacggcgtggcgcgggtgctggagtttctcggcgacgacgtgatccgtcagaaccacgtgggcgactggggtacccagttcggcatgctgatggcttacctgcaggaaaacccgatcaccagcaacgagctgtcggacctggaaaacttctaccgcgccgcgaagaagcgcttcgacgaatccgaagaattcgccgaccgagcccgtggcctggtggtcaagttgcaggccggcgacgaggaatgcctggcgctgtggaaccgcttccgtgaaatttccctgtcccactgccaggaaatctacgaactgctcaacgtcaaattgaccatggccgatgtgatgggcgaaagcgcctacaacgacgacctgatcaacgtggtcaacgacctcaaggccaagggcctgctggtggagagcaacggcgcgcagtgcgtgttcctcgaagaattcaagaccgccgacggcgagccgctgccggtgatcatcgtcaaggccgatggcggctacctttacgccaccaccgacctggcggccgtgcgttaccgcagcggcgtgctgaaagccgaccgtgcactgtatttcgtcgaccagcgccaggccctgcacttccagcaggtgttcgaagtggcgcgtcgcgcgggtttcatcacccacccgatgcacatggaacacatgggcttcggcaccatgaacggcgccgacggccgcccgttcaagacccgcgacggcggcaccgtgaagctgatcgacctgctgaccgaagcccaggaacgcgcctacaacctggtgaaggaaaagaacccggagctggccgaagccgacctgcgcaacatcgcccgcgtggtgggcatcggcgcggtgaaatacgccgacctgtccaaacaccgcaccagcgactacagcttcaacttcgagctgatgctcaacttcgaaggcaacaccgcgccgtacctgctgtacgcctacacccgagtggccggtgtattccgcaaactgggcaaggacttcagcgaagtcgaaggccagatcaaccttgaagcgccccatgagcaggaactggccgccaagctcgcgcaattcggcgaagtgctgaacagcgttggcgagaaaggcacgccgcacatcctgtgcacctatttgtatgaagtcgcgggcctgttctccagcttctacgagaactgcccgatcctcactgccgacgatgaagcccaaaagcaaagtcgcctgcgcctcgccgcattggctggacggaccctcaagcaaggcctggaactgttaggcctggaaaccctggagcgtatgtaagttggctgccaagaaaaaacctgcacccaagcgcggcgccagccgctaccaggccccggcgaagaagccgattccgggctggctgtggatggccatcggcctggcggtcggtgcgtttgtcgtcatcctgatgaagctggagccgggcaagggcgatgacgtcaaacgcgtcaagcaggagcagcagaaggccaccaaaatcgccgaagccaacaagacggtaccgagcccgactgcacccgtgaagccgaaatatgacttctacacgcttctgccggaatcggaagtgatcgtgccgcctgatgccgtgccggagaaaaccctgccgacgccacaggtgccgaccacgccggtcacgcctgccgaagcggcaaaaatcgacacggcgcgtgcgcaagccgctctggcggggattaccccgccgccaccgccaccggttgccgccaccaaggccgcgccggtgaccaagttcttcctgcaagcgggctcgttcccgaaacaggcggatgcggaccgtgtgcgtgcacagattattttgctgggccaggcggtgacggtggagtccggcacggtgaaggacgcgacttggtatcgcgtgctggtggggccgttcagcaaccgcgaacaactgaccgtggcgcagaagcaattggccggcgccggctttagtaacctgttgttacaacaacgccagagccgctgacttacagtcaacacagatcaactgtgggagctggcttgcctgcgatagcggtgtaacagtcaatatttcagtgactgacacaccgctatcgcaggcaagccagctcccacatttggttttgtggtgttcttgaataggtgtcagaccaataaacaccactcgtccgcacagccgtcctacggttgaaatcccccccgccacccccatatgagtttccatcagggcattttcgccccgctgcgtggagactctccccttgaccaccatcgtttcagtacgtcgccacggcaaagtcgtcatgggcggcgacggccaggtttcccttggcaacaccgtgatgaaaggcaacgccaagaaagtccgtcgcctgtaccacggccaagtgctggcaggctttgccggcgccaccgccgacgccttcaccctcttcgagcgtttcgaaggccagttggaaaaacaccagggccacctcgtacgcgctgccgtcgagctcgccaaagaatggcgcaccgaccgctccctcagccgcctggaagccatgttggccgtcgccaacaaagacgcttccctgatcatcaccggtaacggcgatgtggttgagcctgaacatggcctgatcgccatgggttccggcggtggctacgcccaggcggccgccagcgcactgttgaagaaaaccgacctttcagcccgtgaaatcgtcgaaaccgccctgggtatcgccggcgatatctgcgtgttcaccaaccacaacttcaccattgaggagcaggacctcgccgagtaagccgtaggcttattccgcttgaggccgccaaacactatgtccatgactccccgcgaaatcgtccatgaacttaatcgccatatcatcggccaggacgatgccaagcgcgccgtagccattgcgctgcgcaaccgctggcgccggatgcaactgccggaagaactgcgcgttgaagtaacgcccaagaacatcctgatgatcggcccgaccggcgtcggtaaaaccgagatcgcccgtcgcttggccaagctcgccaatgcaccgttcatcaaagtcgaagccaccaagttcaccgaagtgggctatgtgggccgcgacgttgaatcgatcattcgtgacctggccgacgctgccctgaaaatgctgcgcgaacaggaagtgaccaaagtcagccaccgcgccgaagacgctgccgaagaacgcatcctcgacgccctgctgccaccggcgcgcatgggtttcaatgccgacgctgcgccggcctcggactccaacacgcgccagctgttccgcaagcgcctgcgtgaaggccagttggacgacaaggaaatcgagatcgaagtctccgaagtgtccagcgtcgacatttccgcaccacctggcatggaagaaatgaccagccagttgcagaacctgttcagcaacatgggaaagggcaagaagaaaagccgcaagctcaaggtgaaggacgcactgaaactggtgcgcgacgaagaggccgggcgcctggtcaatgaggaagaactcaaggccaaggccctcgaagccgttgaacagcatggcatcgtgtttatcgacgagatcgacaaggtggccaagcgcggcaattccggtggcgtcgatgtatcccgcgaaggcgtacagcgcgacctgctgccgctgatcgaaggttgcaccgtgaacaccaagctgggcatggtcaagaccgaccacatcctgtttatcgcctccggtgcgttccacctgagcaagccaagcgacctggtaccggagctgcaaggccgtctgccgattcgcgtggaactcaaagcgctgaccccgggcgactttgaacgcatcctcagcgagccgcacgcttcgctcaccgagcaataccgtgagctgctgaaaaccgaaggtctggggatcgagttccaggcagacggtatcaagcgcctggcggagattgcctggcaggtgaacgagaagaccgagaacattggtgcgcgtcgcctgcatacgctgcttgagcgtttgcttgaggaagtgtccttcagtgccggcgacatggccggcgcccagaatggcgaggcgatcaagatcgacgcggattacgtgaatagccacttgggcgaattggcgcagaacgaagatctgtcgcgctacattctgtaagccacacgtagagccgctttgctttaatgtgggagctggcttgcctgcgatagcgatggtgaattcaccatcgctatcgcaggcaagccagctcccacatttttgagccggtttcttcaggatcatctcctatgaccaaattccccactgccgtaaacctgcacaagacctccaacaccctcggcctcacctacgggcccgacgaggtgtaccaactctccgccgagctgctgcgcacccactcgccgtccgccgaggtccagggccacggcaaacccatcctgcaattcggcaagctcaatgtccgcttgaccaagatagaaccggccggtcagtacgcactgaaattgaccttcgacgacgggcatgacagcgggctgttcacctgggactacctctaccaactggccgtgcgtcaggacgcgctgtgggccgactacctggccgaactcaaagcggccggaaaaacccgcgacccgagcgagtcggtcgtgcggctgatgctctaatccagcggtcttgctctttagagggcattttctaatttcatctgcttgaatgccctctcttgtggccaacgattggcccgcttgcgaaaaaaattaaactcgggtaaccaatggaactggcaagttccctgcatttgacgatgcggtattaacggtcacccgagtcgcgtacctggcttgtgttgtgtatcgaaacctggtgcacagcggtacccggtactcgtctttcggacaatggagcgtcgtagatgagtaacaagaacaacgatgacttgaaacgccaggcctcggaaaacaccctggggctgaacccgatcatcgcgttacgcaaaaaggatttactcgcctcggcgaagatggtgctgacccaagccatcaagcaaccgctgcacagcgtcaagcacgtcgctcactttggcgtcgaactgaagaacgtgatgttcggcaaatcgcagcttgtgcccgagagcgatgaccgccgcttcagcgaccccgcctggagccagaacccgctctacaaacgctacctgcaaacctacttggcgtggcgcaaggaactgcacgactggatcggcgacagcaacctgtccgaacaggacatcagccgcgggcacttcgtgatcaacctgatgaccgaagccatggcccccaccaacagcacggccaacccggcggcggtcaaacgcttctttgaaaccggcggcaaaagcttgctcgacggcttgtcccatctggccaaagacctggtccacaacggcggcatgccgagccaggtcaacatgggcgcctttgaagtcggcaagaccctgggcaccaccgaaggcgccgtggtgtttcgcaacgacgtgctggagctgatccagtacaagccgatcaccgaacaagtgcacgagcgcccactgttggtggtgccgccgcagatcaacaaattctatgtgttcgatttgagcccggaaaaaagcctggcgcgcttctgcctgcgcaacggccagcagacttttatcgtgagctggcgtaacccgaccaaggcccagcgcgagtggggcctgtcgacttacatcgaggcgctcaaggaagcggtggatgtggtcacggccatcactggcagcaaggacgtcaacatgctcggcgcctgctccggtggcatcacctgcactgcgctgctgggccactacgccgcactgggagagaagaaggtcaacgccctgaccctgctggtgagcgtgctggacacgacgctggacacccaggtggcgctgttcgtcgacgagcagaccctggaagctgccaagcgccactcttaccaggccggcgtgctggaaggccgcgacatggccaaggtgtttgcctggatgcgccccaacgacctgatctggaattactgggtcaataactacctgctcggcaacgagccaccggtgttcgacatactgttctggaacaacgacaccacgcgcttgccggccgccttccatggcgatctgatcgaactgttcaagaacaacccgctggtgcgcgccaacgccctggaagtgtgcggcacgccgattgacctcaagcaagtcaccgccgacatctactcactggccggcaccaacgaccacatcacgccgtggcagtcctgctacaagtcggcgcagttgtttggcggcaaggtcgagtttgtgttgtccagcagtgggcatatccaaagcattctcaacccgccgggcaaccccaaggcgcgttaccagaccagtgacagcctggcggcgaagccattggagtggcaggaaaatgcaaccaaacatactgattcgtggtggttgcactggcaggcgtggcaagcggaccgggcgggcaagttgaagaaagcgccgacgagcttgggtaataaaacctataccgcgggtgaggcggcgccgggtacatacgttcacgaaagataggctggaatgggatcaaatgtgggagctggcttgcctgcgatggcatcaactcggtgtacctgatacaccgcagcgcatgcatcgcaggcaagccagctcccatactgaccgtgttcccacagggaaatagtgcgccattttgcagggtaagcccatgccgcaaccgttcatcttccgcaccatcgacctggatggccagaccatccgcacggcggtacgcccgggcaagcctcacttgacgccgctgctgatcttcaacggcatcggcgccaaccttgagctggtgtttccgttcgtccaggccctggacccggacctggaagtgattgccttcgatgtgcccggcgtgggtggttcttcgacgcccagcgtgccctatcgctttcccggcctggccaagctcaccgcacgcatgctcgattacctggactatggtcaggtgaatgcggtgggggtgtcgtggggcggcgcgctggcgcagcaatttgcctatgactacccggagcgctgcaagaagttgatcctggcggctacggcagccggggcggtgatggtgccgggcaagccgaaagtgctgtggctgatggccagcccgcgccggtatatccagccgtcccatgtggtgcgcattgcgccgatgatttatggcggctcgttccgccgcgacgccaaactcgcggccgagcacgcgagcaaagtgcgctcggccggcaagctgggctactactggcaactgtttgcaggcctcggctggaccagcattcactggctgcacaagatccgccaacccaccctggtactggcgggcgacgacgacccactgatcccgctgatcaacatgcgcatgctcgcctggcgcatccccaatgcacagctgcacatcatcgatgacggccacctgttcctgatcacccgggccgaggccgtggcgccgatcatcatgaaatttctcgaagaggagcgcctgcgcgccgtgatacacccgcgacccgcgatttagaggttcaaggtcaggacgacctaccgcgcaactctggcaaaaccgactatggttctggattggcgtgcctgttgatggcttgacgaaggagtgttggctcatgcgagaaagacccgtgacgaacccggcgcccacccctgccgcgttcatcaatgcgcaaaacgcgatcaccggcctgcgcggccgggatttgctgtcgaccctgcgcagcgtcgccgcccacggcctgcgcaaccccgtgcacaccgctcgccatgccctcgcgctgggcgggcagttgggtcgcgtgttgctgggggaaaccgtgcatgagcccaaccccaacgacagccgttttgttgacccgacctggaagctcaacccgctgtaccgtcgtagcctgcaggcctatttgagctggcagaaacagacgcgtcactggatcgacgacagctcgctgagcgccgatgaccgtgcccgcgcgcactttgccttctccctgctcaacgatgcggtgtcaccgtccaacaccctgctcaacccactggcggtcaaggagttgctcaactccggcggccacagcgtggtgcgcggcgtgagcaacctgtttgaagacctgctgcacaacaacggcctgccgcgccaggtgagcaagcacgccttcgaagtgggcaagacggtggcaaccacccccggctcagtggtgtttcgcaatgagctgctggagctgatccagtacaagcccatgagcgaaaagcagtacgccaagccgctgctggtggtgcccccgcaaatcaacaagtactacatctttgacctgagcccggccaacagctttgtgcagtacgccctgaaaaacggcctgcagacctttatggtcagttggcgcaacccggatgtgcgccaccgtgagtggggcttgtctacatacgtggcggcgctggaagaagcgctcaacgtgtgccgggcgatcaccggggcccgtgaggtcaacctgatgggcgcgtgcgcgggcgggctgaccatcgcggcgctgcaaggccacctgcaagccaagcgtcagctgcgacgcgtctccagcgccagctacctggtgagcttgctggacagccagatcgacagccccgccaccctgttcgccgacgaacaaaccctggaggccgccaagcgccgctcctaccagcaaggcgtgcttgacggccgcgacatggccaaggtcttcgcctggatgcgcccaaatgacctgatctggaactactggatcaacaattacctgctcggcaaggaacccccggccttcgacatcctgtactggaacaacgacaacacacgcctgcccgccgccctgcatggcgatttgctggacttcttcaagcacaacccgctgagccatcccggcggcctggaagtgtgcggcacgccaatcgacttgcagaaagtcacggtggacagcttcagcgtggccgggatcaacgaccacatcaccccgtgggatgcggtgtatcgctccacccaactgctgggcggcgagcggcgctttgtgctgtccaacagcgggcatatccagagcattctcaacccgccgggcaaccccaaggccaattacgtcgaaaaccccaagctgagcagcgacccgcgcgcctggtactacgacgccaaccacgtcgaaggcagctggtggccgcagtggctggagtggattcaacaacgctcaggcgtacaacgcgaaaccctcaccgccctgggcaaccagaactacccaccgatggaagcagcgccgggcacttacgtgcgggtgcgctgagctcaacgatcacattaagaagactggatgaagacccgcgaccgtatccttgaatgtgccctgcagttgttcaaccacaagggcgagccgaacgtgtcgaccatggaagtggccaatgaaatggggatcagccccggcaacctttactaccacttccatggcaaggagccgttggtgctcgggctgttcgagcgctttcaatgtgaactggcaccgctgctcgacccgccttccgacgcgcaactggagcctgaggattactggctattcctgcacctgatcgtcgagcgcatggcccattaccggtttctgtttcaggacctgtcgaacctggccgggcgcctgccgaaattggccaagggaatccgcaacctgctgaccgcgctcaagcgcacgctggcttcgctgttggcgcggttaaagacggcggggcaattggtcagcggtacacaggcgttggggcaactggtggaacagatcaccctgaccctgctgttttcgctggactaccagcgggttctggatcgcgaaggtgaggtgcgggtagtggtttaccagatcatgatgctggtggcgccgcatctgttgttgcctgcgcgactcgcgaccgagaagttcgcgctgaaatacctggatgacaccgattaaaactgtgggagcggcggtgcgacgattcgacttgcccgcgatagcggtggctcagccaatatctatgtgactgaaactccgccatcgcgggcaagcccgctcccacattggatctgtgacgctcaaaaaaatcataaaaaatgcccgaccttcgcaggccgggcatttttttacgccctgaaaaaatcaggactgactggagggcgtcggggttaccggcgttgcagtcggggtggaagcagcgtgtgtcggtgcggacaccgagttggctgtcgaggcacttggcgcaggggttgcaggcttggccgcaacagctggctttggagcagccggcttcttggcgaccgcaggcttcttcgctgcagcaggttttgccgctggcttggcagccacaggttttgccgcagcaggcttggcggcaggttttgcggcggccggcttggctgctggtttcgcaacggctggcttggcagcaggtttggcggcagcggttttagcggctggcctggctgccggttttgcggcggctttggcagctggttttgcagctggcttggcagcagctttagcggccacgggtttcgcggcaggcttggcagctggtttggcagcagcggttttagcagcaggcttggcggcaggttttgcagccgctttggccggagccttagccgcaggtttggcagccggtttggcggcggctttaaccagaggcttggcagcggttttggccgccggtttggcagccgcagttttagcggcaggcttggcagccggtttggccgctgccgttttagccggagccactttagcgccggtgagtttttcaatttgcttggtcagggtatcgaccttgctgtgcagcgttttcagctctgccttgctcggcacgcccagtcgcgaaatcgcactgttgaggcgtttgtcgaacgtttcttccaacttgccccaggtatcagaaatacccgacttggcggaaccggcagtagccttggccgcgtcaactgttttaccaaccgtgcttttggtcaacttctcggctttctcgccgtccttgaccaaagactcgaagagttttttgccttcaccaatgctagccttcgagtacacgcctaaaccagcaagccagatcttacgggaatatttttcaacttccccgacccacgagctgccttctttctgagtagtctttttaacagccatcccgatgtctccttagtgtttacgcgcgacacgttctagcaatgccgtcagctcttcgagcttagcagagagtgtctcaacgtcatgtttagacgcaatgccgatccgattcaaggcacttgcaacacgcgtgtcaaaagctttttcaactttaaccagttgaagttctaccaaacctttgacgtttgagacattactctttacttggtcaatctgactgttggcagcgtcaagttgttcaaccacaacttttttgcctttgctttcaacatgttgaccactcttaaccagctctttgaagtactcgctgccttcgctgccgaccttggcataggcgccaagccctgccagccagatcttgcgggcatagctttttacgtcactcagggcggtggactgaacgtcgatttttttcttcaaaataactttggccatggtgcacctcacgcagaaaagggtggaggaacgccccgcaggagttgagggcttgggcacaaagtagggtgaaaaattagaatcggcaccctaagaacagaccaatcaagccagcgccttatccagggctttctcgatttcggacttgatggtgccactcatggccgacatcaacaggcccagttccacatcaatacgcagtgaatcctcggcaaccaatacgctgcctttaacccccgagcgcttgaggttcaaggtatcgccggaccacgtcggctccaggccatattgttccttgagtttgcttgccaacttctcggccttcgcccgtgcgccttctttacccagggtgtgtgcacgttcaacggtaatacgggccattgcaatgactcctctttataacgactcggaacacccgccatgcggcaaaaggtctcggtggccacctatcttaccttcagccttgccaagacaaagcaggtcgtggggattatcatgtcccgcattctcttttggtgacagcgatatgactgatcagcgcaaaggcagcgatgccgaacccaccactcacttcggcttcaagaacgttccggaaagccagaaagcggaaaaagtcgctgaggtgttccactccgtcgccgccaagtacgacctgatgaacgacgtgctctcgggcggcatgcaccgcctgtggaagcgcttcaccatcgagttgtcgggcgtacgcaccggcaaccgcgtactcgacatcgccggcggcacgggcgacctggcggccaagttctccaagctcgtgggcccaaccggccaggtcgtgctggcggacatcaacggctcgatgctcaaggtcggccgcgatcgcctgctggataaaggcgtggcgggcaatatcgaattcgtccaggccgacgctgaaaagctgccattcccggacaaccatttcgactgcgtgaccatcgctttcggcctgcgtaacgtgacccacaaagaggacgcaatccgctctatgctgcgcgtgctcaagccgggcggccgcctgctggtgctggagttttccaagccgaccaacgcactgatgtccaaggtctacgacacttattcgttcgccttcatgccgctgatgggcaaactgatcaccaatgacgccgagagctaccgctacctggccgaatcgatccgcatgcaccccgaccaggaaaccctgaagtcgatgatggtagaagccggcttcgaccgcgtgacctaccacaacatgacctcgggcatcgtcgccctgcaccgcggcatcaagccctgatgttgctcaagggtcttctcgccagcgtggaacacggcctcaaccgtgtgctgcgcctggacagcaccgccctggcgcggctcgcgcacttgaacggcaaagtcatcgccgtcgactgccgcagccctgccttgcagctgtttatcctgcccagcgacgaaggcctgctgctcgccaccgattgggccgccgacgccgactgcaccttgcgtgcgccggcgtcgagcctgctgcacctggccgtgagccgcagcaagaccacgatcctgcacagcgccgaagtggaactggaaggcgacagcgcggtgctgatggacctcgccgccgtgctgcaagacctggagctggactgggaatatgagctgtcacgctggatcggccccgtcgccacccagctgatcagcgggcacctgcgcagccgcacgcgctggtaccagcaagggttcgccagccttaaccagaacctcgccgaatacctgagcgaagaatcgcgcaccctggttggagaacgtgaagcgcaagcgcgctttcgtgaactcgacaaggccaaaatcgacctggaacgccttgaggcccgcttcgagcgcctgagccgttcccttgatccaagcgataacgcatgaagctgctcgccgtccgccgtttgtttcgtatccagcgcgtcgtaatccgctaccgcctcgatgacctgctgttcgccctgccactgccgtggttcctgctggcggtgcgctacgtgctgccgtggcgctggttcccgcgcaagcagcttgaactcagcaggggcgcgcgcctgcgcctggccttgcaggacctggggccgatctttatcaagttcgggcagatcctctcgacccgccgcgacttgctgcccgaagacatcgccgacgagctgatgctgctgcaggaccgtgtgccaccgttcgactcgcaacagtcgatgaagctgattgaagaacagctgggcaagaagatcagcgaagtcttcagccgtttcgacgtcgacccgctggcctcggcctcggtcgcccaggtgcacgcggcgcagctcaagaccggtgaagaagtggtggtgaaggtgatccgcccaggcctcaagccgatcatcggccaggacctggcatggctgttcatcctcgcccgtgctgccgaacgcttcagtgccgatgcgcgcctgctgcacccggtggacgtggtcgccgactacgaaaaaaccatctacgacgaactcgacctgctgcgcgaagccgccaacgccagccagctcaagcgcaacttcgaaggctcgcagttgttgtacgtgcctcaagtgtattgggactggtgccgccccaaagtgctggtgatggaacgcatctatggcgtgcaggtcacggacctggccacgttggccgaccagcgcaccgacatgaaaatgctcgccgagcgcggcgtggagattttcttcacccaagtgttccgcgacagcttcttccacgctgacatgcatccgggcaacatcttcgtcagcaccgtgaacccgtggagcccgcagtacatcgcaatcgactgcggtatcgtcggcagcctgaccccggaagaccaggattacctggcgcgcaacctgttcgcctttttcaagcgtgactaccgccgcgtcgcccaattgcacatcgattcgggctgggtgccggcggaaaccaaactcaatgaattcgaagcggcgatccgcactgtgtgcgagccgatcttcgaaaaaccattaaaagatatttcattcggccaggtgctgatgcgcctgttccagaccgcacggcgcttcaatatggaagtgcagccgcagttggtcctgctgcaaaaaaccttgctgaacatcgaagggcttggccgtcagctgtacccggacctggacctgtggaacaccgcccagccgttcctggagcgctggatgcgtgagcgcgtcagcccgaaaaccttgatcggcaacctgcacagccagttcgaacagctgccgcacctggccaacatgacccgcgacctgctggagcgcatgtcccagccccacgccaaagaccctgcgccgccctggcacaaacgcaaggacgactggttcctgcgcctgctgggcgccgcgcacctggtgggcggcgtgatgctggccatcggcgggccgctgaaccaactgggccactggccggccggtatcatggtcgccgtgggtatttatctgatcgtgcgtcgatagccaatccggttatacactgtcgcaaattgccggagcgagacatgaaagactggctggacgagatcaagtgggacagtgacggcctggtgccggccattgcccaggactacaagaccgggcgcgtgctgatgatggcctggatgaaccgcgaggccctgagcctgactgccgctgagcagcgcgccatctactggtcacgctcgcgtggcaaactgtggcgcaagggcgaagagtccgggcacgtgcagaccttgcacgagatgcgcatcgactgcgacgccgacgtggtgatcctcaaggtcgagcagatcggcgacatcgcctgccacaccggccgccacagctgcttctaccgcgtgttcgagaacggcgagtggaaaaccgtcgagccggtgctcaaagacccgcacgccatctactcggcaggacactgaacatgagcgataccctgaaccgcgtggcccaggtgctggaagaccgcaagggcgcggacgccgacagctcctatgtcgccagcctttaccacaagggcttgaacaagattctggaaaaactcggcgaagaatccgtcgagaccatcattgcagccaaggacgcgcagatcagcggcgactgcagcgatgtgatctacgaaaccgctgatttgtggttccacagtctggtcatgctcgcccaactggggcagcatccgcaggcagtgctggatgaactggaccgtcgcttcggcttgtccgggcatgccgaaaaggcttcgcgcccgtccgcctgaataactttcacagaggaattgcagcatgggcatttttgactggaaacactggatcgtcattctggtggtagtggtactggtgttcggcaccaagaaactcaagaacctgggcactgacgtgggcgagtcgatcaagggctttcgcaaagccatgaacgacgatgaaaaacctgccgacccgatcgtcacgcccgtcccgccggcccagcctgtgcacccgcaggccacccagccgatcaccgaacgtcgcaccttcgacgtgcaggctgagaaagtcgaagagccgacccgcaaagactcgtgagcactgactaatgtttggtatcagcttctctgaactgctcctcgtcggcctcgttgccctgctggtactcgggccggaacgcctgcccggtgccgcgcgcacggctggcttgtggatcgggcgcctgaaacgcagtttcaacgccatcaaacaggaagttgaacgggaaatcggcgccgacgagatccgtcggcaactgcacaacgaacatattctgtcgttggagcaggaagcacggaagattctgtctccggtgaatgaaacggccaagccggccgagcctgtggccgaacacagcatcgcgcctgcgcctgccgttgaagccacacccgttgcgccggtgccgaccgcgccaaccgagcctgcgccgacgcccgttgcgtcgcccgcgccccatgaccctacattgccgccgcgagccccatgagcgctgataaaccggaaaacgaccagcacatgccactggtctcgcacctcaccgagttgcgtacccgcctgctgcgttgcgtagcggccattttcatcatctttgccgggttgtttgcctttacccagcagatctacaccttcgtttccacgcccttgcgccagtatttgccggccggcgcgacgatgatcgccaccgacgtgtcgtcgccgttcctgacgccactgaagctgaccatgatggtctcgctgttcctggcgatcccggtgatcctgcatcagatctggggctttatcgcgccgggcctgtacaagcatgagaaacgcatcgccgtgccgttgctggtgtcgagcattctgctgttctacaccggtatggcgttcgcctactttctggtgttcccgctgatcttcaagttcttcgccgccgccaccccggccggcgtggaaatgatgaccgacatcaccagctacctcgacttcgtgatgacgctgttcttcgcctttggcgtggccttcgaaatcccggtggccgtggtgctgctggtgtggatcggcgtggtcgacgtcaaatacctgaagaaggtgcgcccgtacgtgatcatcggctgcttcgtggtcggcatgatcctcacaccgccggacattttctcccagaccctgttggccgtgccgatgtggatgctgttcgagattggcatcctgttcagcggcttgatcagcaagcgcggcgaacatccggatgaccaacctgccgacgacgaccagccgccagcgacccagccgtgaacctgctgctgctcgaagaggccgactttatcgcggccgaccgcgtggtgctgcgtgacaggcgcctggtacacatgcaggaagtccaccgtgccgccgtcggtgacaacctgcgtgtcggccgggtgggcgggctgatgggcaatgcgcaactgctgcgcctggaagcccgcgaagccgagttgcaagtcagcttcgaccaaccgcccccggccaaactgcccctgaccctgttgcttgcgctgccacgcccgaagatgctgcgtcgggtgctgcaaaccgtggcggccatgggtgtgcccaaggtggtattggtcaacagttaccgggtggaaaagagcttctggcaaaccccgttcctggagcctgaggccattcgcgagcaattgatcctcggcctggaacaggctcgcgacacggtactgcctgaaatcatcatcgaaaagcgcttcaaaccgttcgtcgaagaccgcctgccggccatggccgaaggcaccctgggcctgatcggccaccccggcgattacccgccctgcccgcgcgagctagatgagcctgtgaccctggccattggcccggagggtggctggatcccttacgaggtggacctgctggccaaagccggtctgcaaccggtacagcttggcgcacgcatcctgcgcgtcgaaaccgccgtcaccgccctgctcgcccgcctgttctgacccgcagttagccaacaacacagatcccctgtgggagcgggcttgctcgcgaatacggtgtatcagtcacagatattttgagtgaaccaccgcattcgcgagcaagcccgctcccacattggatttgtgttgttacagtttcctgcgtacctgccgatagcctctgaataagtccaagccttgttccaaaggagatcgctgtatgtaccgtctgttagccgaaaaactggggaatgtgagcgtcaatcgcaagctgggcattggctttggcctggtgttgatcctgacgctattgatcaccttcaccggctggaccggcctgggtgatgtgaccagtcgtggcgacaaactcggttttatctccagcctcaacagcctgaccaaagacctgcgcctggcgcgcctggactttgaaatgcgccgtggcgagcagggcaccgatgcggtcaacaacctgatcacccaattggaagcaggcctgaaaaccgccgaaaacctgatcgaacagcccgacgacaaggcgctcgtcgaacagcagctggacgccttgaaccaatataaaaaggcctttggcgccatggtttttgccggcctcaagcgcgaaggcgcacgcagcaagcttggcgacactgccgacaacgcggtggccaagacccgcgaaatcgaaaaagccctgctgcaaggggacagcgtcacccagttcaacagcgtggtcgacctgagcaagctgatccagcaagcgcgcttccaggtgcgcggctacacctacagcggcaagccagacgccgagcaaccggccctggacgccatcgacaatgccttgaagaaaatcaccgagctccaggggcaactgccagagcagtaccaggcgaacctgcaagaggccagcacctcgttgcaagcctatcgcgcggcggtgagccagtaccgcgactcccaagtggcaactgcggcagccctgaaaattacggtcgaacaaggcgacatcctgctgggccacagtgacaaactcaccgtctcccagaccgtggtgcgcgatcacgacgcggcacaggccaagcaactcctgctgttggcgaccgtactcgcactgatcttcggcatcgtcgccgcctgggccatcacccgccagatcgtcatcccgttgaaccagaccctcaaagtggccgagcgtgtcgcttccggcgatttgagccataacctcaactcaggccgccaggatgagctgggccagctgcaacgcgccatgcaaagcatgaccgtgggcctgcgcgagttgatcggtggcatcagtgatggcgtgacgcagattgccagcgctgccgagcaactctcggcagtgaccgagcagaccagcgccggggtcaacagccagaaggtcgagaccgaccaggtggctaccgccatgaacgagatggccgccaccgtgcaggaagtcgcgcgcaatgccgaggaagcctccgaggccgctgtggcagccgaccagcaagcccgtgaaggcgacaaagtggtgggcgaagccatcgctcaaatcgaacgcctggccaccgaggtcggcaactccaccgaggccatgggccatctcaaacgcgaaagcgacaagatcggcagcgtgctcgacgtgatcaagtccgtggcccagcaaaccaacctgctggcactgaacgcggcgattgaagcggcgcgtgccggtgaagccggacgaggctttgccgtggtggccgacgaggtgcgcagcctggcccagcgcacccagaagtcgactgaggagattgaagagctgatcgtcggcctgcaaagcggcacccagcaggtggcgaccatcatggacaacagccgcagcctcaccgacagcagtgtcgagctgacccgccgcgccggcaacgcactgggcaatatcacccgcaccgtctcgaccatccaggccatgaactcgcagatcgccaccgctgccgaacaacagagcgcagtggccgaagagatcaaccgcagcgtgctgaacgtgcgcgatgtgtcagaacaaacgtcgtcggccagtgaagaaacggcggcgtccagtgcggagctggcgcgtttggggatctatttgcagaccctggtcgggcgctttcgcgtctgattgactcaatctcggcggccaaccgtggccgccccacctcgcaacttgtgaaacttcctacgcagttatcagcccgccacatcgccaaatcgctttagcgtttaaacacgcttttactgatttggagagtcgacatgttcccccggctgacccgcttgctggccaacgccagcgtccgcctgaagcttgctttgggttttggccaagtgctgatcctcagcctcattatcgccgtgaccggctggcaagccttgagtgcagcgctgtttcgctcaagcaacctgatcgtcctcggccaactgaccgctgtaaccgaggcgatgcgcgccgaccgcatcgtgtaccgcaccctcactgacaccgacagcctgggcaaaatggtgctgcagatcgaggaaatcaacaggcacctcaactacctctccgaacatgtgatagatccggttgaccggcagcgcttgcgggacgccgagcagttggtaacccatttcaacaccgcgcttgtgcagttgccgcctctgatcgagcaccgcgacgccacccgcccgatgctgcgtaaaaccgcccagcaagccagcgacacactcgcccaactcgccagcgggctgccggaccagccttcgcgcgacgccatcgagacactgcgccaagccatgaagcaaaccgaggagcgagcccagagccccgcctgggctgccgaatcgttgcaagcctatgccgaggcggtgggcaaaacactcgacgtcttggacctcgcacaggccgcagtcatgagtatgccggttaacgctacccggcttaaggctgacctgacggactaccgcgctttgttgattacgctcaaagaggctcagttgagcaccgaaacggcccagaaccgcttcgaacaacagctcaatcagctgctcgaactgagcgaacaggtgcgtcaggggcagatcttcaagcgtgaccgcgaggcagagaacacccgcgcactgctcatcagcgtcacggccgtggcgctgtcgctcggcgccctggccgcgtggtggatcgcccggcagatcgccatgccattgcgccaggccctggtggctgccaaccgtgttgccgagggtgacctcagtgaaaacacgctgctggagcgccacgatgaactgggccagttgcagcaaagcatcgggaaaatgacgcgaaacctgcgagacctgatcagcggaattggcgacagcgcccaacaaatcgccagtgccgccacacagttaaccgcggtgaccgagcggactcgcaacggggtcaataaccaacgtgacgaaaccgatcaggtggccacggccatgaatgaaatgctcgccactgcacatgaagtcgcccggcacgcggaacaggcgtccacagccgccagcgaagcggaccggcaagcgaatgcgggggagcaggtcgtcacgcaagccgttgagcaaatcggccacctggcccatgaaatggcgcgctccggccaggcgatgctggcgttgcaacacgagagccaaaagatcggcagcgtgttggacgtgatcaaatcagtgtcccagcagaccaacttattagcgctcaatgccgccatcgaagcagcacgggcgggcagcgccggccggggttttgccgtagtcgccgacgaggtgcgcagccttgcccaacggactcaggagtccgccgaagaaatcgaagggttgatcctcagcttgaataccggcacccagcgggtggcggacatcatgggcagcagccgcagcctcaccgacaacagcgtgagcctgacccgtgacgccggggacgcattggcggcgattgcgcgtacggtgtcgatcatccaggagatgaacccgcagatcgcggcagccgcggaggagcaaagcgcggtggccgaggagatcaatcgcagcgtcctgaatgtgcgcgatgtgtcggaacagacggcggcagccagtgaggaaacggcagccgccagtgttcaattgacgaagttgagcctggatttacagaccctggtcggcagattcaggctctgaggtttatgtggttgtcgttgtggtgagcgagcttgctcgcgctggggcgcgaagcggtcctaaaacccgccaccgcgttctctcagacaaaacgcggtgtacttattggggctgctgcgcagcccagcgcgagcaagctcgctcgccacaaaattacaggacctgacgcaggaaggcctgggcgcgcgggtctttcggcgcatcgaagaactcggcgggcgaagcgtcctcgagcagtttgccgtgatcgaagaacagcacgcggtcggccacttcgcgggcaaaacccatttcgtgggtgacgcagaccatggtcatgccttccagggccaatgtcttcatcacgtccagcacttcgccgaccatttccgggtcaagggccgaggtgggctcgtcaaacaacatcaccttgggttccatggccaacgcgcgggcgatggccacgcgttgctgctggccaccggagaggcgcgacgggaattcattggccttttgcgcaatgccaaccttttccagcagcgccagcgccttggcttcccgctctctcttgccgcgcttgcgcacgactttttgcgccaggcacaggttttccagcacggtcatgtgcgggaacaggttgaagtgctggaacaccatgccgacttcgcggcggtaggcgttcacgtcggttttcgggtcagccagttgcaagccgtcgatactgaccgaacccgagtcgaattcctccaggccgttgaggcagcgcaggaaggtcgatttgccggagcccgacgggccaatcaccaccagcacttcgcccttggcgacctgggtagtgacgtggtccaccgcgcgcaccacgtgaccacgggtgtcgaagacttttaccagatcgcggacttcaatcactttgcgcgagcctccgctcaagccggctggccattttcgacagcggcaggttgatcagcaggtacaggcctgccacacagaacaggatttcaaacggtgaaaacgaggtggtgatcacttcgcggccgcttttaagcagctcggtgatggcgatcactgacaccagcgaggtgtctttgaccaggctgataaattgcccggccaatggcggcagcacgcgcttgaaggcctgcggcaataccacgtggcgcatcgactggctggcgctcaagcccagggagcgcgccgcttcgttctggccacgggtaatcgattgcaccccggcgcgcacgatttctgccacataggcgccggtgaacagcgacaacgctgcgaccccggcaaattcccgggacaggttgagcaccgtaccgatgaaaaaatagaaaatgaatatctgcaccaatagcggcgtgccgcgtaccagttcgacgtagatcgtcgacagatcgcgcaaggtcgggttgctggacagccggcacaaacccgttgccaaaccaatcgccagccccaaaatacccgacaccaccgacagccacagcgtggtccacaagccccacatcaacgggccgagtgcccaatgacgggtgaccccgactacatcgccttcggccacgtcatcgccgcgcgccacttgcaggctgttgtcggcgacggtcagcttttgctcggcgccggcatcgttgcgcagggtgacctcggcaacatcgcctttgcgcaccagctccaccaccgtggagatgtcagcggcgcgctgggaggtttccgcctgataggcgaagtactgcggtacgcggttccagcgccattcgtaggccatcagcgaggtggcgtagtacaacgcgccggccaggccgaccagcacgaccacggtcagcaggtgccagggccattgggcttttttcggtttcatttcactttccaggatttgtgttgcttgtcaggccgtcatcgcaggcaagccagctcccaccttttgatctgcgaacaaaatcaaatgtgggagctggcttgcctgcgatgggagcgactcgatttcagcctgacttattccatgtccttgagccactcggagctcttgaaccacttgtcatggatgcgatcgtaggtgccgtcgttacggatctggtgcaggaaattgttgatgtagttgaggctgtcgtaatcgccttttttcaggccgaaggccaggggctcaaacgtgaagggttcttcgaggaacaccagcttgccgttgccgactttcttctcggccaccacgttgtacggcgcgtcatacacaaaggcatccgccttgccgttgaccacgtccagcacaccttcctgctcgttgtcatagccgtggtacttggctttggagatcagctttttggcgaccatctcgccggtagtgccgagcttggacgtcaggcggtatttctcgtcgttcaggtctttgtaagacttgatggtgccttccaggtccttgcggatcagcagggtctggccgactacgatgaagggttcgctgaagttcaggcgcaggttgcgctcctgggtcagggtcatgccgctgccgatcatgtcgaacttgccggtcaggaaggccgggatgatgccgtcatagccggtggacaccagttccagtttgacgcccatggacttggccagggccttgaggatatcgacttcaaaaccgatgatttcaccgcgtttgtctgtcatttcgaacggcatgtaagtcgggtccatgccgactttcaacgagccgcgcttgaccgcatcgtcgatggcaccggcctgggccgcagtggcggcgaccagcgccgtgacgccgagcagcagcatcgaaagatactttttcatcatcaagtcccctggacgattcttgtaaggtcggcgcgcaaaagggctgcaccaattcggggtgcgatcctaacccactcgcctcctgtcacaaaggtttcacgggtaaatgttgtcggcgtatgtcggaaaagccccacaacggtgcagcgagcgctggcggtagaggcttcagcgtctgatagtcggcaatccgttgatgtgtaagcagttatgacgatcagtcgatgtccgccatccattcagtgtccttgaaccacttgtcgtgaaggcgatcgtaggtcccgtcctgggccacttgattgaggaagtggttgatccagttgaggctgtcgtaatcgccttttttcacaccaaaggccagaggttcgaaagtaaacggctgctccaaagccagcaacgcagtgttctgcggcttggtcatcgcgatcaggttgtaaggcgcatcatgaatgaaggcatcggccttgccctccactacctgccgcagggcttcctccggggtagcgaaactgctgatccgggccgtgcccagaaagcgctgtgccgctgcttttgcggtggtgccctctgtggccacgacccggtaaccggggtcgtcaaggtcttcaatgctgaacaccttgccggccaggcgggggttcagcaacaaggtttggccgacgacaataaaggagtcgctgaaattcaacttcaggttgcgctcctgagtgaccgtcataccactgccgatcagatcgaattttttcgccattagccctggcagcaagtccgtgtagggcatcgggatgagttcaagctccacccccagggcgctgctcattgccttgagcaggtcaatctcaaaaccaacgatacggccttgcttgtccgtcatttcgaacggaacgtaagtgggtgtggtgccgactttaagcaccccgcgatgaacagcatcgtcgagggcgccggcgctcagcaggcttgagtgagccacagcgagcgcgccgatcagccatgccgaacaatactttttgaacatgaatccccccgcagccaatcgaatgtgcgggggatgctaccccagccacaggcacggcaatacgcttcgaacgaaggtcttttgtttcgaaataacaaggggttatgagaaaaaggaagaggcgggaaacgctgtaggaccagcgtttcaaacacccccgaggtgaggcctcgggggtgtcggaatcaggccggctgggcctgggatgacagcggttgcagcggcagcaaaggcgcgtgcggatccgctttgatcgactcacgccaagcgcccagccactcggcgtggccttcgctccagacctgctcgtgcaggcgggccagggcgaccgggtcgctgagcaatgccagacgctcgccattgttgaggccggccgggccgactttcaacgcgtggcgaacacgctcaaggcgcaagtactcgatcggctcggcttcacggtgacgcgaagtcgccagggcacaggccagggcattttgctgcgggtcgaccaccgaacgcacaaacccgtcattcagggcgtgccaacggttttcgtgggtgtacttctcggtcgacaacagcgcttgcggcgggttgtattcttcagggatcagaaacaggctctcgtcgcgagacttgaggcccagcttgacccggctggaaatcaccgacaccggaatcgacagcatcagcgaaccgacgatagggatcagccaccacaggaaactcgggttcaaccacaccaccaacagcgcccacaggaaacccagcacggtttgcggaccgtggcgcttgaccgcctcgctccacggagtggagtcgtcgtcacgctgcggcgagttccaggtcgccgcccagccgaggaacgcggcgagcacgaagcgggtgtggaaaatcatccgcaccggcgccagcaacatggagaacaacatctccagcagcatcgacaaggtcaccttgaacttgccgccgaactctttcgcgcccttggcccagatcaggatgatgctcagcagtttgggcaggaacagcagcacgatggtggtggagaacagcgccaccgctttgtccgggtgccattgcggccacagcgggtacagctggcgtggcgccatgaagtactgcggctccatcaaggtgttgactgccaacagggccgtcgacagcaccaggaagaagaaccacaacggcgccgacaggtaagacatcacaccggtcaggaacaccgcgcggtgcaccgggtgcatgccttttaccaggaacagacggaagttcatcaggttaccgtggcaccagcgacggtcacgcttgagttcgtccagcaggttcggcggcagttcttcgtagctgcccggcaagtcgtaggcaatccacacgccccagccggcacggcgcatcaacgctgcttcaacgaagtcgtgggaaaggattgcaccggcgaatgcgcctttgcccggcaacggcgcgagggcgcagtgctcgataaaaggcttcatacggatgattgcgttgtggccccaatagtgggattcacccaactgccagaagtgcaggccggccgtgaacaacgggccatacacacgcgtggcgaactgctgcatgcgcgcatacagggtgtccatgcccgaggcacgcggcgcggtctggataatcccggcatccggcgtggcttccatcaagcgcaccaggctcgtcaggcattcgccgctcatcacgctgtcggcgtcgagcaccaccatgtacttgtattcaccgccccagcgacggcagaagtcgtcgaggttgccgcttttacgtttcacgcgacggcggcggcggcgatagaagatcttgccaaaaccaccggcttcgcggcacacgtcgagccaggcttgctgttcggcgatgcagatgtcggcgtcattactgtcgctgagcacgaagaagtcgaaacggtccaggtcaccggtggcggcgaccgattcgaacgtcgcgcgcaggccggcgaatacccggggcacgtcttcgttgcagatcggcatcaccagcgcggtgcgggcatctttcggaatcggctcgtcaccggcacttttaccggagatgcggtatttatcgtgaccggtcagcagttccaggaagcccatcagcgcggtccagaaaccggctgaaacccagcagaacaaaatcccgaacatgatcaggatgctggtttgcagggcgtaaggcagtacctgggtagcggtttgcagcagggtctggttgcggatttcgtcgaacgaaaccagtgaccagccctgatacggcatgatgcctttcatgtaccagccggcgacgatggtttggccgagcatcaacaccagcaaaatatagcgacggatcgaaccgacggtacgccagcgcgcggccggcagtacgcggtcgtctttcggcggcttcggcgggttggtgcggccggtcaggcggcgccagccccgtaccagaatgttggtgcgccaaggctcgggcaccactttggtacgacggatcggcggcgtggccttcaggcaaacccggccactggcatccagcgccagcatttcggcgtcttgcagctcttcggccgtgttgagggtcagccggcggccaaccgacgcttgggcagcgtcggtcggtgcgtcgaaggccttggacgacaggcgctcgtgcagctcgctgaaggatgagcagcccgccagttcggcgcgctgctcagcggtcatcgggagatgcgccaggtactcggacagagtctcgggcgtggcttgagaattactcatcggcaggcaactggtagctccaggtctcggtcaggactttttcggtcttggccggttccggggtagaaagtggtgcagcaggagcagcgtctggctgcttggcttccttgtctttcgcatctttggcgtctttagcgtctttcgcctcttttgcgtctttcttggcctgcttctcgtgttgcttggccagcagcttgtcagccttgagcacctgggtcgacgccttctcaggctcggcctgcggaatgtcctgaaccagggccgcacgcatttcggtcggtttgcctgcgtccttgatcttcatccgcagggtcaaacgccagcctttggtgtgctcgttgtagcgcacgctgttttcaacgatttcagcgttgtcgccgacgctgacctggctgcgcaccggagcatccgacggcagggctttcagggacgggccctcgaagtcgaccaggtaggccacgctgccatccggctgacggatcaggttggactgcttcacgtcaccggtggaacgcagggtctgcttgacccaggcgctgtcggccgggtgcaggtccttctcgtccatggtccagtgcaggcggtaggacacgtccagcggctcgccgactttcggcaactcggccgggctccagaacgcaacgatgttgtcgttggtttcgtcggcggtcgggatttccacgaggtcaacagaacccttgccccagtcgccttcaggctcgatccaggcacttgggcgcttgtcgtagttgtcgtcgaggtcttcatagtggctgaaatcgcggccacgttgcagcaggccgaaaccacgcgggttttccacgctgaagttgctgaccgacaggtgtttcgggttgttcagcgggcgccagatccactcaccgttgccggcatggatcgacaggccgctggagtcatgcagctcacgacggtagttgagtactttcgacggctggttcgcgccgaacaggtacatgctggtcagcggggccacgcccagcttggtgaccttgtcgcgcaggaacatctgggatttgacgtcgacaatggtgtcggtgccagggcgcagggtcaggcgataagcgccggttgcacgcggggaatccagcagggcgaagatcaccagctgtttctcacccggtttcgggcgctcgatccagaactcggtgaagcgcgggaactcttcgccggacggcaaggcggtgtcgatcgccatgccacgggcagacaagccataggcctggcctttgcccacgacgcggaagtagctcgcgccgagcatggtcatgatttcgtcttgcttgtcgtctttgttgatcgggtacagcacacggaaaccggcataacccagttgttcggtggctttgggatcaaacttgacgtcgccgaaatcgaaacgggtcgggtcgtacttgatttcgtgcacgctgtcggcggtcacttcgttgatttttaccggcgtgtcgaaatgcatgccctggtgatagaaggacagcttgaatggggtgttctgatcggcccactcggctttttcgttgcggaaacgaattttctggtaatcagcgaatttcatttcgcggaattcgttcggcagattgctgcgcggagcttcgtacttctgcccggccagctcttttgccttggccgacacatcgtccagactgaatgcccacagttgacccgcgccgaacaggcaaaacagggcagagcccgtcaccagtgcgtttcgtaaccgtttggcagacaattttggtgcattacagggactaacaatcacgagcaaccctcgccgaaaacagatcaaaaaaccaacggccagctatctatatgccaggttggcgagcattgttccgactcccctgggtcaaaatgattccccaaaggccgtcggacaagtctctacctaagtcaaaaatggaccaaacaacgctgatccccatagcgcgcgattatctagtagcccgcgaaacaacgcatcagggacagcgaagtatttgtagcgaaaccctgcgtttttaggcattaaagtcgtttttaatacattcatgtctgtaagaggaatgtcacagggccatcattgaccaaatacacctgcatatccgcgccaaaacgccctgacgccaccttgccatgcaattgttgcgcttgtaacagcaagtgatcaaaaagtgccgctcccaggcccggaggggccgccgtggagaagcttgggcgcagcccgctttttgtatccgccgccagagtgaactgcgataccagcaacaaaccgccgccgatgtccttcaacgacaggttcatcttgccctcgtcgtcgctgaacacccgatagttaagcagcttgtgcaaaagtttgtcggcactctcgggcgtgtccgagggttcgacggccaccagcaccagcaaaccctggtcgatggccccgaccacttcgccttccacttctacccgggcaccacgcacccgttgcaacaagcccttcatgcttcttctggcggcagatcaagcaggcgccgtgccatttcgcccgtcgcgcgcaccaatgcatcggtgataccgggctcggacgcggcatggccagcctcgcggatgacctgcagctcactgttgggccacgcctggtgcaacgcccaggcattgtccagcgggcagatcatatcgtagcggccgtggatgattacgccaggcagatgggcgatcttgtgcatgtcgcggatcagctggtcgggctccaggaaggagttgttggtgaagtagtggcactcgatgcgggcgatggacagcgcgcgttgcggctcggaaaagcgctcgacgtgctgcgggctcggacacagccccagcatgcgcccttcccagccggaccaggccttggccgcgtgcatttgggcaatctggtcgttgccggtcaagcgcttgtgataggcgccgagcatgtcgtggcgttcatccaccgggacaggcgccaggtagtcctgccagtaatccgggaacatgcggctcgcgccttcctggtagaaccagtgaatgtcctgcgggcgcgccaggaagatgccacgcaggatcaggccaagcacgcgctcgggatgggtttgcgcgtaggccagcgacagggtcgaaccccaggagccgccgaacagcacccatttgtcgatacccaggtgctcgcggatgcgttcaaggtcggcgaccaggtcccaggtggtgttgttttccaggctggcgcggggggtggagcgcccgcaaccgcgctggtcgaacgtgacaatgcggtacaggttcggatcgaaatagcagcggctctgcgcgtcgcaaccggcgccggggcctccgtggatgaagacgacaggcaagccttcgggggagccactttcatcgacgtacaacgtgtgggtgtcatcgactgccagatcgtgccgggcgtagggtttgatctgcgggtaccaagtctgcattgcgcgctccgtagggtgtcgggttcatccctggggggacgtctattattctgccgtctggcatcataaacccgaattgtgcaatgagcatgtccttgagcgcttagacctgtgtcagcccttcgctcctcaggtaatacagcaagtagtcaaagagcttgtccacctccggcacctggccgcgggcgcgcaaacagccgtggaccaggcctttgcccggatacagcacagtctcaccgcccgccgtacgcaggcgctcggcgtagagcatgccatcgtcgcgcagggggtcgaactgggccacggcgatcagcgccttgggcaacccggcaaaactctgcgccagcagcggcattgcataggctgacggttggcgggtaccgcgcaggtacaacgccaggtagcagtcggtgtcggcggtgctgagaagcggcgcgtccatgcagtcgcgacgcgacggcaaatcggcagggccgccgagacctgggtaaatcaatacctgagcttggggcagcggttgcccgtcatcgcgcaggccaaggcacaaagccgccgccaggttgccgccagcgctgtcacccattacggccaaacgctgcaggttaatgacgtgaggcccctctcccctctggatcgccttccagacggcacagcaatcctcaaaagccgccgggaatggatgttcaggcgccagacggtagtcaatggcgatcaccagaacttgcagggtgctggccaattcgaaacaaatgaaatcgtgggaatccaggccgccgacggcccagccgccaccgtgcatataaaggaggcacggccagccgtcggccggagtttgcgccgtgggcaagtagctgcgcacgccgacgccgcccaaggcaaagtccgagacttgcagcccttcaggcttcggcggggtgaaggcctggcacatgcggtcgtagttctggcgcaggccggccagggatgagtcgtcgctggtgaaggcttcggttttggtgatgaaggcagcaagctgtggagaaaccggatacatgcgcaaatatccctatcaatggagatcaagtgtgggagctggcttgcctgcgatggctatctgtcagttgatgcatctttgactgatagaccgctatcgcaggcaagccagctcccacatttggattcgcatcaggctcagggtttgaggctggactgcactgcggtcacgccatcactgccgtcaaacgcggcaactcccgccaaccagcgctgcaaatcctcagggtggtcacgcaaccactgcctggccacatcctgcggtgacttgcgctccatgatcggcaccatcaactggctttcctgggcggcggtgaaggtgaggttttccagcaagcggttggcattcgggcagcgctcggcgaaatctggcgcggtgacagtcgagaccgtggcgcggccttcatcggggccgaacacgtcttcactgccggtgaggtaggccattttcatgttgatgttcatcgggtgcggcgtccagcccacaaacaccacgaactccttgcggttcaccgcgcgctgcaccgccgcgagcatgccggcttcaccggaggccaccaacttgaagccgccaaggccaaaatggttggtgtcgatcattttctgaatatcggtattggccccgctgccgggctcgataccatagatcttgccgcccagcttgtccttgaagcgcgcaatgtcggcaaacgttttcaggcccgcatcggccacatattgcggcacggcgagggtggcctgggcgtcggcgaggccaggtttctccaggactttgacctgccccgccgcgaggaacggtgcgatgttgttgtccatcgccggtttccagtaaccgaggaagatgtccaggcgcttgtcgcgaatgccggcaaagataatctgctgcacggcgctggtctgtttgctgtcgtagccaaggccgttgaacagcacgtcggccatgccagaggtggcgatcacatcggtccaactgaccacgcccatgcggatgcttttgcaggaggccggttcggcggccatagcgttgacgctgatcagcgcagcgcaggtgagggtcaacaacagtcttttcatggatgagggctcactcggcagcttttattgtggggaatggcgtctgacgcgccgtacccacaaccttacccagcgggacctctgataacacgaactgtggcgaccggcagttgcactggtgcgactgtggagcctcatcgcaggcaagccagctcccacatttggaacgcattccaaggtgggagctggcttgcctgcgatagcgatttcagccgtaacgctgctgcccccaggctagcaacccttcgagcaattgcttcaacaccacccgcgtcggctcagccaagtccggccgataccggaacggctcaacctcttccatatacgtgctctggcacaactccaactgcacggcatggatatcctgtgccgggttgccgtaatggcgggtgatatgcccacccttgaagcgcccgttgagcacgtgggtgtactgcggatgtttggcgcagatggcttcaagctggccggccaactcaggatcgcaggccgcgccattgaaagtgccgaggttgaagtccggcagcttgccgtcaaataggtgcgggatcaccgagcggatcgagtgcgcgtcaaacagcagcgcatagccaaactcggctttcaagcgcgccagttcctcctgcagcgtgcggtggtatgggccccaaactttttgcaggtaagtcgcgcgctcttcctcggatggcacctgaccttcgcggaacaacggtacgccatcgaacagcgtcgccgggtacaggccggtggtggcgcctgcgtacaagggcgtatcgtcagacggccggttcaggtcgatcacaaaccgcgaatactcggcggccagtgtgctggcgccgagttcttcggcaaagtcatacagcgtggggatatgccaatcggtgtccggcaggctttgcgcctcggggatcaacccggcctcgaccgcaggcgtaaggcgtaggccagcgtggggcatgctgatcagcagcggtacgcggccttgtttgaacgtcagaaccttatccacaacaacactcctcagacggtgacatcgacgccgtggcgcacgacgcgtttatccagctcgccgcccagccagtaggcgaggtcagcagggcgatcaatctgccaggcgacaaagtccgccaccttgcccacttccagagaaccatgggtctcgcccatgcccaacgcggtcgccgcgtgagtggtggcgccagccaaagcttcttccggggtcatgcggaacagggtgcaggccatgttcagcatcaggcgcaccgacaacgccggcgaggtgccggggttgaggtcgctggcgatggcgattttcacgccgtgcttgcgcagggcctccatcggcggcagctgggtttcacgcaggaagtagaacgcgcccggcagcaacacggcgacggtgccggaggcggccatggcaatggcgtcttcttcggtcatgaattccaggtggtccgccgacagcgcgtggtagcgcgccgcgaggctggagccgtgcagggaagacagctgctcggcgtgcagtttcaccggcaggcccaactgccgggcaaccttgaacacgcgctccacctgctcggtggaaaacgccaggtattcgcagaaggcatccaccgcatccaccaagccttccgccgccagggcgggcagcatttcggtgcagatgtgatcgatgtagtcgtcggcgcggtccttgtattccggcggcaacgcgtgggccgccaggcatgtggcgcgcacgctgaccggcagcgcttcgccgagtcgacgggccactcgcagcatcttgcgttcattggccaggtccaggccgtagccggacttgatctccaacgtggtcacgccgtcacgcagcaaactgcgcaggcgcttttcagcgctggcaaacagttcatcttccgtggcggcgcgggtggcgcgcacggtgctggcaataccgccccctttggcggcgatttcggcgtagctcacgccttcaaggcgctgctcgaactcgccactgcgattgccaccaaacaccgtgtgcgtgtggcagtcgatcagcccgggggtgacccacgcgccttgcaggtcatgcacctgggcgtaatccaccgtgggcacttggctgcgggggccgatccactcgatgagtgcaccggctgtgaccatggcggcgtcctcgatgatcgagtacttgccctgagccatggttgcgacgtggcagtgttgccaaagcgttttcatcaacgcctccctaaattaacgatgagacaaagccgggtcgtaatggaccttggccgcttgccctgccgcaggtttgacccacagcaggtaggccacgaccagcagcacgatccatacggcgccgaccagcaaagcggcttgggtgtccgggaagtaacccagcacaccaaacacgaacagcatgaagacgatggcggccgctggcgcatacggccagagcggtaccgggaatttcagctcggccacctgctctttagtcatggagcggcgcatggcgacttgggtgaacaggatcatcagccacacccacacggtggcgaaggtggcaatcgaggcgatcagcaggaaaacgttttccgggatcaggtagttgagcaccacgccgccgagcaacgcggcgcccatcaccaccacggtcatccacggcacgccttgtttggacaactgcgcaaaacccttgggcgcctgcccttgctgggccaggccatacatcatgcggccggccccgaagatgtcactgttgatcgccgacaccgccgccgaaatcaccacgatattgaggatggtcgccgccgagccgatgccgaggttgctgaagatctgcacgaacgggctgccctggctgccgatctgcggccatgggtagatggccatcagcacaaacagggtcagcacgtagaacaacaggatgcgcagcggcacggcgttgatcgccttggggatcacacgttgcgggtctttggcttcaccggcggtaatgccgatgatttcgatgccgccgaaggcaaacatcaccacggcgaacgaagcaatcaggccgccgacgccgttgggcatgaagccgccgtgggcccacaggttactgagaccgctcgcctgagtctcgcccgccgagtgaatgccgaacagcatgatgccgaagccgccaaggatcatcgcaacgatggcgccgaccttgagcagtgacagccagaactccatttcgccaaacactttgacgttgcacaggttcaggccgccgatcaaaaacacaatgccgagcacccagacccagcgcgcgacttcgggaaaccagaagcccatgtagatgccaaacgccgtcacgtcggcgaggcagacgatgatcatttcaaacgcgtaggtccagccgaggatgaagccagccatggggcccaggtaggtgctggcgtactggccaaaggagccggacaccgggttgtgcacggccatttcaccgagggcgcgcatcaccatgaacacggcggcgccgccgatcaggtaggccagcaacacggcggggcccgccatctggatggccgaggcggagccatagaacagcccggtgccgatcgcggaaccgagtgccatgaagcgaatatgtcgggcgttgagcccgcgtttcaaacccttttcttgctgttgcatttctcttccctagttatttttatcccgagaaaattttgagctgcgaacgctcaactgtgggagctggcttgcctgcgatggcggtgtgtcagtcatacatggatcaactgacatatcgctatcgcaggcaagccagctcccacattgatcggtgttgcgcgttacaggcttggcagcaacttggccggcaccagctcattcaggcaacggctggcgagcagttcgctggcggcgttgatgtcgggagcgaagaaacggtccttttcatagaacgccactttgtcgcgcaaaatgccgcgcgccttttccagcttggtcgaggtcttcaaaccgtcgcgcaggtccaggccctggcacgccgccagccactcgaccgccagcacaccccgggtgttctcggccatttcccacaggcgcttgcctgcggccggggccatggaaacgtggtcttcctggttggcggaggtcggcaggctgtccacgctgtgcgggtgggccagggccttgttctcgctggccagtgccgccgccgttacctgggcgatcatgaagccggagttcaccccgccattgcccaccagaaacggcggcagttgcgacatgtgcttgtccatcatcagcgagattcggcgctcgctcagggagccgatctcagcgatagccagggccatgttatcggcagccatggccaccggctcagcgtggaagttgccaccggagatcacatcgccttcggcggcaaacaccagcgggttatccgacacggcgttggcttccaccaccaatacttcagcggcctggcggaactgggtcaggcaggcgcccatgacttggggctggcaacgcagggagtacgggtcttggaccttgtcgcagttctggtgcgactgcgacacctcgctgctttcgccgagcaggtcacgataggccgccgcggcgtcgatctgcccacgctggccacgcgcggcgtgaatacgcgcgtcgaacggcgagcgcgaacccagcaccgcttccacggtaagcgcgccgcatgccagggcgccggcgaacaggtcttcgccttcgaacaggccacgcaatgcgtaggccgtggatacctgggtgccgttgagcagcgccaggccttctttggcggcgagggtcagcggcgtcaggccggcgattttcagcgcctcgctagcctccagccattcgcctttgtagcgtgccttgccttcgcccaacagcaccaaagacatgtgcgccaatggcgcgaggtcaccggaagcgccgaccgaccctttgagtggaatgtgcgggtacacctcggcgttgatcagtgcgatcagcgcgtcgatcacctggcggcggatcccggagaacccacggctgaggctgttgaccttgagcaccatgaccagccgcaccagcgcatcgctgatcggctcaccgacgccagcggcgtgggacagcaccagggaacgctggaggttttccaggtcttcactggcgatgcgggtcgaggccagcaggccgaaaccggtgttgatgccgtacgcggtgcggttctcggcgagaatctgctccacgcaggccacactggcctcgatctgcgccgtggcgctgtcatccagactgagggttaccggctgctggtagatggcccgcagttgggagaggctcagttggcctggaatcaaatttagcgcagtcacattcatgctcctttgaattgttcttttgaaaaagtagtcagtgcaaatggggaattgcctggcgtagcaaagcggtgtctttgagcagcgcggcggtggtcgcgatgtccggcgccagccagcggtcctgctcgtaggccgggactttttcgcgcagcaaacgccaggcgctgtcggtgcccgcgccgaagcgctggtccttcaggaattcgaaagcctgagccgcgagcaggtactcgatggcgaggatctggttcacgttggccaacagctggtgcagcttgagcgcggcgttggtgcccatgctcagatggtcttcctgcaggcccgaggtgacgaagttgtcgagcaccgccggttgcgccagctggcggttttgcccgcacagcgaagcggcgacgtactgcacgatcatcatcccggaattgaccccggggttgctgaccaggaaggccggcaagccactgacgtgcgggttgatcaggcggtccaggcgacgctcggccacggagccgatctcggccatggcgatggcgagcatgtcggcggccagcgcaacggactgcccgtgcgggttggcctgggacaccacgcggtagttgtccggcgtgccgaggaccagcgggttatcggtggcactgttaagttcggtctcgatctggcgggtggcgtgctccacttgatcacgcgcggcgccgtgaatctgcgggatcgaacggatgctcaaggcgtcctgggtgcggatgcctttgctgctggcgatcacttcgctgccgtcgagcaaggcgcgcaggttgatgcccacttgcagcatgcccgggtggggtttgagggcgatgatggcttcgtcgaaggcatcgatctgcccgcgctgggcctcgaaactcatggcgccgatcacgtcggcccattgcagcaaatggtgcgcgtccgccagggccaggcagctcaggccggtcatgcacggcgtgccgttgaccaggcacaggccgtctttggcgccgagcaccaccgggtgcaaaccttctgcgtttaatgcctcttgagccgaaacgatcttgccctggtaactcacattaccgacacccagcaaggccacgccgacatgggccatgtgggtcaggtaacccaccgacccctgggacggcacttgcggtgtgatgccgtggttgagcagcgccagcagtgaatgcaccacctgcgggtgcaggccggatttgccgtggctgtagttgatgatcgccgcgcagatgatcgcgcgggtctgctcgtcgctgagcacctggccgacgccgcaggcgtggctcagcagggtgttgcgcgacagttggctgagttgctcgcctttgagcgacacattgcacagcgcgcccaggccggtgttcacgccataggcgcgttcgccgctggtgacgatgcgctgcacgatggcttgtgcattatcgatgcgcgcccaagcgtggcccgagagttcgaggacggcgccgtggcgggcgacggcgaccacgtcctgccagcgcaagggggcgtcggcgatgatgatttttactgcctgggacatcttcataccttcttcaattcttgtgcagcttcactggcaccatcgcaggcaagccagctcccacctttggaatgcattcccttgtgggcgctggcttgcctgcgatggcgccagccaactcaccacaaagcccggatcagaccaccgccgcacgccgctgtacgaaccggtccacatactcatccgccggcgaatgcaaaatctcccggggcgtgccgacctggatcagtttgccgtccttgaggatcgcaatgcggttaccaatacgcacggcctcgtcgaggtcgtgggtgatgaacacgatggttttgtgcagggtcttttgcagctccagcaactggtcctgcatctcggcgcggatcagcgggtcgagggcgctgaacgcttcgtccatcaggatgatgtcggtatcggccgccaaggcgcgggccaggccgacgcgctggcgcatgccaccggagagctggtgcgggtatttgttttcgtagcctttgaggcccacggtttcgatccagtgcagggcgcgctcggcgcagacctgcttggtttcgccacgcactttcaggccgtaggcgacgttgtcgagcacgctcttgtgaggcagcaggccgaaactctggaacaccatgctgatcttgtgccgacggaattggcgcagggcttccatgtccagttgcaggatgtcttcgccgtccaccaggatcgcgccgctggtggggtcgatcaggcggttgaagtgacgcaccaacgtggatttgccggagcccgacaggcccatgatcacgaagatctcgccggtgccgatgcttagggacaaatcgttcacaccgaccacgcaaccggtctcggccagcacctggtccttggtcttgccctggccaaccatcgccaacgcgtccttggaacgcgcgccgaagatcttgaagacgtttttaacttcgattttgctgacagtagtcatttgctcgcctcatgccgtggacgaccataggcctgggtaatgcggtcgatgaccactgcgagaatcacgatcgccagcccggcttcgaggccgcgaccgacgttgagggtctggatgccgaccagcacgtcttcacccaagccacgggcgccgatcatcgaggcgatcaccaccatcgacagcgccatcatggtggtctggttgataccggccatgatgctcggcaacgccagcggcagttgcacgccgaacagttgttgccagcggttggcaccgaaggcgttaatggcttccatgacttcgccgtcgacctggcgaatgcccaggtcggtcaggcgaatcagtggcggcgcggcgtagatcaccgtggcgaaaatcgccggaaccttgcccaggccgaacagcatcaacaccgggatcaggtacacgaagctcggcatggtttgcatgatgtccaacagcggcatcaataccgagcgcaggcgattgctgcgcgccgagagaatgcccagtggaatgccgatcagcaccgagatcaccgtggcgaccatcatcaaggccagcgtctgcatcagcttgtcccacaggccaaccgcgcccaccaggaacagcaggccgacgattactgcggtggtcaccaccttgcgggtggcgtgccaggcaatgccggcgacgatggccagcatcaaccaccagggcgctgcacgcagcaacccttccaggttgacgatggcccatagcagggtgtcggagatgtgccggaacacatcgccgtagttggtgaccagtgagtccacccaaccgttgacccagtcggcgatggaaaacgtaaaactctcaggaaacatatcgtgctctcgatccagtgggttgtggccgggcgcccggctgcctgttggggcaaccgggaacgctcaacctacaaggccgcgtcgattttcttggctgcgtcgtcgctcacccatgcgtgccagacttcaggatgttccttgaggaaaattttcgccagttttggcgactcaattcgctctttggccatgcgaccgaggttctggttcagcaaatcgatcggcaggttgaccttttccagcaccgctaccagctcaggggcttgttcgtggaacgtcttggacaggccgaccttgatgctcacgcttttatccacaccgggtttttcttccagcttgaccaggtcgacctggcccatcaacggcgtcggcgaccagtagtagaacaggatcggctcgccacgcttgtagctcgacagcaccgccgcatccagcgccgggccagtgcctgggcggaagttggtgtaggtgctttcgaggccatagcttttcagcatttcgctgttgtccagctcacaggtccagccggccgggcagttgtagaaacggcccttggacggttcttcctggtccttgaataccgaggcgtatttggccaggtcggcgatgtttttcaggtccggcgccttgggttccagcttgcgtttggcatcgccttcgatcacatagcgcggcacgtaccagccttccacggcacccacaaccggggcaccgacgccgacgactttgccggctttctcggccttgttccacacttcgctgcggcccacccattcttcggcgaagacctggatgtcattgctgctcagggcgttttccatggtgatggagttacccggcaggctgtcggttttgcagtcgtagcctttttccagcacggtttgcaggatgtcggtgagcaacatgccgctttcccagttcaggccggcgaacttcaccggcttgccggattcgcaccagccggccgcctgggcaccagcgctggccagcaagcccgcagaaatcaatgcagccatcatggtcttattcattttcattgttgtgacgctcccaatcttgaaatggattacggcagtcagtaggcatcctgccctgtccacgtcccatcaggcttgtgcagccagcccggttgttgttggtgcagcgccctgctctgttggcaggatcaggtgttcgggcacagtgccgtgccatttttttgcacacaggtaatacagcgccgccggcagaaccaggccgatgatccaggaaatatccacatcacccagcgcagccaccaggggcccggtgtagaacttggtcgagatgaacggcaactgcaccagcacaccgaagacatacacgctgatacccagcaggttccagcggccgtagcgaccgttgggatcggccaaagctggcacgtcatagcgctcacgggtgatgcagtagtagtccaccaggttgatcgcgctccagggcgtgaaaaacgccagcaggaacaggatgaaggacttgaacgcaccgagaaaagagtgctggccgagcagagcgatcagggtcgcggtaccgacaatcaccaacacgaataccaggcgctgcagccgcgtgacttcaagccggccacgaaagccgctgatgatggtggcgatgcacatgaaactgccgtaggagttgagcgtggagatggtgaccttgccgaatgcgatgctgaaatacagcagcgcagccgtggcccccgtaccactcaaacccacgatgtaggccacttcatgcccggcgaattgcccgttggacatggctgcggcaaacacaccgaggaccatcgccacctgtgcacccacgaccgaacccgcgccggcggcgaaaaaggttttcaccgaagacgtggtgcttggcaggtaacgtgagtagtccgccacgtaaggaccgaaggcgatctgccaggacgccgcaagcgacacagccagcaggaaactgctccagctgaagtggcggatttgcaggagtgcgccaacgtcggtctggctcatcaggcggctgaacaggtagacaaaggcgatcacgccaatgacgctggcaacgcgaccgatgaagtggatcacccgataaccgagcaccgtgaccaacacgatgacactggcgaaaatcaagatgccggtgctgtcgctgaccccaaacaactggcccagcgcctgaccggacaataccgtgccggtggcggtgaagccgaggtacatcaggcacaccagcacgatcggaatcgccgcgccgtacacgccaaactgcacccggctggagatcatctgcggcaggcccagcttgggcccttgcgccgcatgcaacgccatgacaccgccgccgatcagttggccgacaaacaagccaatcaacgaccagaacacatcaccacccagcaccacggccagggccccggtgacaatcgcagtgatttgcaggttggcacccatccacagggtgaactggctcaatagacgaccatgtctttccgcttccgggatgtagtcgatcgaacgcctttcgatcaacggggtggtgtcatttgcagccatgttgttcaacctctgatggattgtttgtcggtggtgcgggtgaaacatgccttgtaaacacagcaggccacactgtgggagctggcttgcctgcgatgctggcggctcggtctgtcagtagaaccgaggagatgccatcgcaggcaagccagctcccacacaagcccgcgcccagattggcttacttgatcatcgggaggttgaggccctgttccttggcgcagtcgatagcgatctggtagccggcgtccgcgtgacgcatcaccccggtcgccgggtcgttgtgcagcacgcgggcgatacgctcagcggcttcgtcggtaccgtcgcagacgatcaccatgccggagtgctgggagaagcccatgccgacgccgccaccgtggtgcagggaaacccaggtcgctccgctggcggtgttgagcaaggcgttgagcagcggccagtcggacacagcgtcggagccgtcctgcatggcttcggtttcgcggttggggcttgcgaccgagccggagtcgaggtggtcacggccgatcacgaccggcgccgacagctcgccgctgcgcaccatttcgttgaacgccagaccgagcttggcgcgctggcccaggccgacccagcagatacgcgccggcaggccctggaagctgatgcgctcgcgcgccatgtccagccagttgtgcaggtgggcgtcgtccgggatcagctctttgactttggcgtcggtcttgtagatgtcttgcgggtcacccgacagcgcagcccagcggaacgggccgatgccacggcagaacagtgggcggatgtaggccggtacaaaacctgggaagtcgaaggcgttttccacgccctcttcctgggccatctggcggatgttgttgccgtagtcgaaggtcgggatgccttgtttctggaattccagcatggctttgacgtgcacggccatcgactgtttggcggccttgatcacggcagccggctcggtcttggcgcgggcgcggtattcatcccaggtccagccggcgggcaggtaaccgttgagcgggtcgtgggcgctggtctggtcggtgaccatgtccggacgcacgccgcgcttgaccagttccggcaggatctcggccgcgttacccaacagggcgatggagatcgctttgccttccttggtgtatttggcgatgcgggccagggcgtcgtcgaggtcggtggcttgctcgtcgacgtagcggctgttcaggcggaagtcgatgctgacctgctggcattcaatgttcagcgagcaggcgccggccagggttgccgccaaaggttgcgcgccgcccatgccgccgaggcctgcagtgaggacccagcggccggtcaggtcgctgttgtagtgctggcgaccggcttcgacgaaggtttcgtaggtgccttgaacgatgccttggctaccgatgtaaatccagctaccggcggtcatctggccgtacatggccaagcccttggcatccagttcgttgaagtgttcccagctggcccagtgcggtaccaggttggagttggcgatcagtacgcgcggggcgttgctgtgagtcttgaacacgccgaccggcttgccggattgcaccagcagggtctcgtcgtcattcaggttggtcaggctctcgacgatctggtcgtagcactcccagttacgcgcggcccggccgataccgccgtacaccaccaattctttcgggttctcggccacttgtgggtcgaggttgttcatcagcatgcgcagcggcgcttcagtcagccagcttttggcggtgagcttgttaccgcgggcggcgcggatttcaacgtcacggaattttgtaggcttggtcacaactaggactcctcggcgatcgatgcgcatacttgatggtgcgaagcggactcttacgcacacatctctacttgtacatacaagcatatgcaatcaagcggccaactttctgaggaagctgtcgagatttttttggaatgcgtgcgcgggccttggaaattaaggcttggaggcttgatgaaatttctttcgcaggaggattacggcgagggagggttgtctcaataacgtgcttttgcgccacgctggggcgttcggtaacaaattggtgcggggctggaaacagatcttcagaacagtagaaatcaaatgtgggagctggcttgcctgcgatagcggtgtatcagtcagcacatctgatactgatacaccgccatcgcaggcaagccagctcccacaattttttaaccgcgtgcggtcagttcgatgatgcagcagcggccactgacagagatgtccaacagcccagtgttaccgtcgatttgcaggcaatcgtgatgccccagcttctcgcccagcaccttcacctcatccgccacgctgaacaccagcacggtatgcgctgtgctgaaaaactgctgcacaccatccacccactgcaaccgcgcgtggtaacgctcaggcgaataaatcaggttgaaatcgcgaatcggcccggtaatcagccggcaagacacttcactttccccacggaacgcaaacggctgcagcggtaacaacccgcgctgctcctcgccatccaccgtcaacaccatgcccgcgcccttgatcacggtgatcacgcgctggtagccggcaaaggtggagaacccgcccgactcggcgatatcggcaatcgacaggcgccagccaaacccctccaggccttcgcctgcatcacgggtgatttcttcggtgctgccgccgccgtttttccacggcatgcgcacgtattcggcggcacgccagactttcacgctactcatttactgaaacgtccttccaggctatgacgggaaccggggtggatcaaacgcgcggcggtcactggctggcgaccggaccaggtgcgacgacggatcagcaggcacggctcactcggctcgatctgaagcagcttgcactcctcggcatcggcgaggatcgcttcgaccacatgctcgccttcggtcagcggcgcaacctggttcaaataggcgtacggggtttgctgggtgaaatcctgctgcaagtagtccggcgccaccagagcgttgacgaaacggtcttcgatttgcaccgggatgtcgttttcgaagtgcacaatcagcgaatggaatacccgcccgccttcgcgcatctccagggcgaccgcgcgctcggagcctgcggcctcttcgcacaaatggatgacctggcaggtatggcgatgaccgcgcgaggcgatctcgtcggcaatgttgtgcacttcaaacagcgccgattggctcttgggctcggcgacgaacgtaccaacgccttgcatgcgcaccagcaacccttcggcggtgagctcgcgcagggcgcggttgatggtcatgcggctgaagcccaactggctgaccagctcgctctcggacggcacgcggtaatgcggcggccagttgccgttgaggatctgctggctgatcatctgtttgacgcgggcatacaagggcgccggactttcgtccatgtgggcagccagcgaagacttggcaggcggagtcggcacagggaatccttgcagggggaaaagatgcatagattgccggagtttaccgagcaggcaaacgtctgtatatgtatatacaaataaacacacgaccggggtgccttgatcatgtccgctttctttgccgaacgcgcgctgctgcctaatggatgggccaacgatgtacgctttgaagtcaacgccgaaggggtgctgacaaaggttgaggccaatgccaatgcagacggcgccgagcggctcagaggcccggttctggcgggcatgccgaatttgcactcccatgcattccagcgcgccatggcgggtttggcggaagtggccggcaacccgaatgacagtttctggacctggcgcgatttgatgtaccgcatggtcggcaagatcagcccggagcaattgcaggtcatcgcgcggcagctctacatcgaaatgctcaaggccggttacacctcggtggccgagtttcattacgtccaccacgacgtcagcggccagccgtatgccgaccgcaccgagctgtcgcggcagatcagccaggcagccgccagcagcgggattggcctgacgctgctcccagtgctttacacccattccgggtttggcggccaggcgccgaatgaaggccagcggcggtttatcaacagcactgaacactacctggacctgcaagcgcggctcaaaccgatcctcgctgcacaaccggcacagcagttgggtttgtgctttcactccctgcgcgccgtcacgccgcaacaaatcaatgaggttctggccgccagcgacaaggcgtgcccggtgcatatccacatcgccgagcagcaaaaggaagtcgacgactgcctggcctggagcggcaaacgccctttgcaatggctgtatgacaatgtcgacgtcgatgagcgttggtgcctggtgcacgcgactcacgccgatgccgatgaagtgacgcgcatggccaagagccgcgcgattgccggcttgtgcttgaccactgaagccaacctgggcgacgggatttttccggcggtggatttcctcgccagaggcggacgcatgggcatcggctccgacagccatgtgtcattgagcgtggtagaagagttgcgttggctcgagtacggccagcgcctgcgtgaccagcggcgtaatcgtttgtaccgcagtgatcagccgatggttgggcgcacgttgtttgatgcggcgctggacggtggtgcccaggcgctggggcaaccgattggtcgtcttgaagtgggcaaacgcgcggactggatcgtactggatggcaatgatccgtacctggcgacggccagcgaagacgggattttgaaccgttggttgtttgccggtggcgatcgtcaggtgcgcgatgtgctggtgaacggcacctgggtggtgcgtgatgggcgtcatgccggcgaagaagaaagcagccgcgccttcacgcaagttttgaaggaactgctcggttaaaactgtgggagctggcttgcctgcgatgcagccacctcggtgtatcagttacaccttggtgatgctatcgcaggcaagccagctcccacattgtttgctcggcagtggctcaggtttattgcgaggtcttcgccatctgcttgtctgacgtgcgccagatcaaccgcgtggtgtcatacccctgctggcgcgccctgctcagcaggtcttcgcgggtgtcggcattgaccgtctgcgtacgagacagaatccacatgtagcgccggctcgggctgcccacgatggcggtcttgtagtcatcgcttacgtacagcacccagtaatcgcccttggcaacgcccggcaacagcgacgtgaaccagttattgaattccacccagagcttgtcggtcttacccggcacttgcggcgtggccgtgcccttggcttcttcccacttccattcggtcgtcaggcagcggttgaacaccgacatgtcgccatcaggcagcagtgtgtagcgggcttcggactgcgcgcagttgcgctggaagtacatcggcaatcgggccaactcataccaggtgccctggtaacgcttgaggttgacgttgctcgcggtcttgggttgcagatcatcgccagaatggctggcgcagcctgccaaaaacaggctggcgcaaaggaacaaaacaaaacgcatcattcttcttctcccgcaggctcgcgccccggtttacttcaggccttgcccggaaaacatcagaactttgtcaccggcgtactgcacgctgataaagctgtttttatcgccccacgtgcaactggacatgcccagtgcgccggaacaatcggtcggcttacccagcaacgactccacctcggccttggccatgccagccgacagcttcgcgtaattttcttgattgaccttgctgcaagcggccaacagcacgcaaaaagccagcagggcgagacggcgtaacgacatggaaaaactcctggagagacgaagcagttggggtatctgccagaagcttagaagggaaaaggggtgtctggttcccgaggtgcaaaaacaaaaaaaccccgaaaacgctgaaacgtttcggggctttttcagtggcagccaggcttacttcttgtgataagccgtcacacgctcaacttcttccttcgaaccgaggaacaccgcgacgcgctggtgcaggccttcaggctgaatgtcgaggatgcgctggtggccgtcggtggacgcaccgcctgcctgctcaacgaggaacgacatcgggttggcttcatacatcaaacgcagtttgcccggcttggacggctcgcggctgtcgcgtggatacatgaacaggccgccacgggtcagaatacggtgcacgtcggcaaccatcgcggccacccagcgcatgttgaagttcttcttcaacgggccttcttcgccttccatcagctcgttgacgtagcgtttcaccggttcttcccagtggcgctggttggacatgttgatcgcaaattcctgggtggaagcaggaatggaaatgtcttcgtgggtcagcacgaagctgcccatttcgcggtccagggtgaaacctttgacgccgtcgcccagggtcagcaccagcatggtctgcgggccatagatggcgtaaccggcagcgacctgctcggtgcccggctgcaggaaggccttttcgttcagggcttcgttctggctcaggtattcgttcgggcagcgcagtaccgagaagatggtgccgaccggtgcgttgatgtcgatgttggacgagccgtccagtgggtcgaacaccagcaggtaggcgcctttcgggtatttgcccgggatctggtaggcattgtccatttcttcggacgccatgccagccaggtggccaccccattcgttggcttcgagcaggatctcgttggagagcacatcgagcttcttctgcacttcgccttggacgttttcagtgcccatgctgcccaggacaccacccaatgcgcctttggacacggcatggctgatttccttgcaagcacgcgccaccacttcgataaggaagcgcagatcggcaggcgtgttgttgctgcgggtctgctcgatcaaatagcgactcagggtaacgcgggacatgtaaggctccggagaatggggggctgaaaaaacccgcgcagtttaacgcgagtcgagggttatttcctctcatcagaggatttaaccccaatagagttcacggtttggccacaggcttgcgcaacaaactgtaggccatcgcccccagcgccgccacaccgagcaagagcacgccccataagccaagcttcttccaatcgatgccgactgcgggcgaagcggcaaaggcaggctgtttgaccaccccctctcccgctacctctgccttgccaagcatcttgagacgctcggcgctgtagtcgggaatcagcgtggataaaggcaagttggccgccttcaccgacgtattgcccagcgccagagtaaacggcggttcaccccgcgccaggaacaccaactgcgtcgcgcgtacggcaaaacgcagggccggtgcttcaacgcccaggccgccgccgcgttcatccacctgcaacttgagctcggcaacggtcaagcccggcagttgcaactcatcctgcaccacctcctgaccgttctgcgtgaggcggtacaacacgccattgctcaacggctgccaggcttgattggcctcacggcgccccgacagcgtcaccggcgccagcgtgttgggttgcttcagttcgatacgcaaacgctcgacattcaaccccgtcggcaactgccagctgtattcgccggccttgagccgcgcgcccgccaacggtggcgaccacaccagcggcgccggcaagttgctgctggtcgcgctgatcagcttggccgaagtcagctgcggcgcctcctggccctgccacaccaggcgcaggtagcgcgcgctttgccccggcagactcacgtcatgctgctcgacccgttcatcagcgaatgacaagcgcgccacctggccatcaccccaggattcccaatgctgcaggtcatcgctggcttcaatgctgaaacgctggaagccgtcccgctcgcgactccaatccaggctcaattgctgcaacggcgccttgatcgcactcgcgtccaacacccaaccgcgcaacgcttgtttgcccgctttggacggccgcacttccagcagcgtgccttcggtggtggctttcatcaccacctccggcaacgcctcgtgggtgtcggcggcgtacagcgggaaccacttcacatccgccacattgcggctctcggagcgctgcgcggactggcgagacaacgcataggcctgctgctcgccggcagcgttgaatacccgcacgtcactgaggtccgcctgacgcgcgctcaattgcacggccagtggcaattccaggcgataccacgggccattgccgctcacggccagcggcacttgcgtggtgaaatccgccggattgtcctgcgcgcccgccgccgaacacaccagccataccgccaacccgccgagactcagcttgcccatcaagacgacgctccttcgttttcaaccacaggttcagcacgcttgggcggcagcggcgcaaagtagcccaccaccagcagcagcccgcccacgccgataaacgacacgatccgcgccagcccgccacggttactcagttcgacaaagaacagtttggccaccaccagcgcaatcagcgccgcgccgatcagccacacttcgcggcgatggcgcaggtggccgccgatcatcaagccgagggcgatcagggtccacacaatcgacagaccagcctgcaccagcatggactccagcaatgcctccagatggaacggcacgccgccccaatggtgagccgcacgcatgaccagcgcggtaaaaaacgcgaacagcgagatgcccgccacgccttgggcgagccgttcaacacgtggcccgcgctccggcgccacgctgcgcgaccacaggaaaacaccgagcaacgcgaacagcaggcccaggtccagcgggttgagcagcggcacatacggcaatggctcggccgtaccgtcgctgaaaatattcgccagccagaaccagccaagcatcagcacggccaacggcaacgccgccagcacgcggtattcgcgcggatacgcagacaccggccacggccaactgcgtggcgcagccgccagcaccagatacagactcggcagaatcgcccaacccagccagcgccaggcgttgtactcgctcgacagcaacagcaggccgtaacgcaactccagcgccagcacgccgaccaacatccagcagcccaacacgtgcgccacgctcaacaccgtgttcggaaccagcgccgccagacggcgcagtgagatgaagtgcacggtgaacactatcagccaggccagccagccgaactgggccgccgggtgataaaactcagtccacgcgccccacaacaccagacccgccgcaggcatcagcaacgtgctggcgatacccaaagccacccagcgcaaacgcagtgccagtgccgtccagatcgccgcgctcagcgcggccgccagcaccaacagcggagcgtgcaaggccgcaggcgccaggcgccacacttcaatgatcaccgccaaggcccaccaggccacaccccaggccagcaaacctgtggacaagcggccacggggcaaacgccacgcgccgagcatggccgccaaggcaatgatcagcggcgtccaagcgttggccacggggtcgagcgcaaatagcgcgccacccagcacctgcccgaccacgccacaacgcacaaccacgggtgaaccgatacgccggcctgcccacagggtcgccaaaccagcgatggcccaactgacgatgctgccttgcgtcgaaaataacagcggcgccagcaaataagcgctgccaaggccaagtacggcgagccagggcgcacccagtcgttcccaacgccgggtatgttccggcgcagcggtgtgcagttgataaaagctgaacaacagcgccgcacccagcaacaacgcccccaatggcggcccctgcagcaaagtgtcctggctgtcgcgcagttcgccgaggaagacgagcaacgaacccagttgcagcaacaaggcgaacgcccgcgccacggggcgctgctgacgcatgccgagccagaagatgccggccccctcgacagcccatgcggcagccgtccagcgcgcatcgagccccaacggaattgcgaggctggcaaagatcacgcccaacgccaggcaggtttcggccagcaacacggcacgcccgccactgagcagccgcgccagccccatgtagagaacgccaagccccaaggcgctgaacgcggcggcgaattccaggtgttgcaccagcgcgaattgcaggccaaagcccaccagcggaggcccgaacagcaggctgccatcaacataatcgcccttggccaccgaccagcgcagcagcgcgtcgcgcccctcaggcgcttcccctctctccagcaacttgcgccgggcgaacagcaggccgatggccaggtacatcagaaaaaatagaatcagaaacggttcagtgctccacagcagctccggcgtgtaggagcgcatgccccagacgaagccgatgccgaaggtgccgacaaaaccgatcaggttgagcagacgccaggccttgaaccaggcaatcgccaggatgcccgcgttgagcaacgcgaagtaactgaacagcgcgacgtggttgccggcgccggtggacgccaggatcggcgcggcgaacccgccgagcgccgccgcgcaagcaaggccgagtgcgtcctgggtaatcgccagaatcgccgaaaacacggtgaccgccaccagcaagccaaacgccgcacccgggtcgatcagcgggtgcaaacgcatcgccgcgaacaccgtgaggtacaacacggcaatgccggcgccttgcagcatcaagccgtaattgctattgcgcagccgcaaccaccaacccaggcccagcaggccgacggccgcggcagcaacaccggtataacgcagctcaatcggcaccaccatgccttcggtggcgtagcgcagcaggaaggccaggccgaggaacagcagcaccacgccgacgcgcaacacggtgttgccgccaaacagccagttgcgcgcgccattgatggcacgttcgatcaggttggggccgcgcggggcagcaggttcggtgggacgttgcgttggcgaaggtgcccaaacatcagctggcaatggctggcttggcgcggtttgcatggcgaccggctcaaggtcggcgggcagctcccaaaccagttcaggcgccttggcgacaggggcctgctcgggggctggcggttcgacgttgacagggcttatcggcgcaggcgcttccagttgccgcaggcgttcacccagagcaatcagcgccttctgcgtggtttccagctgacccgcttgcttgtgcgcctgggcggcgagctgtgacaggcgaatcgcctggccaatgcccaaccctaacaacgcaccgaaaccggcatcggtgaacgactcatcgagcgtccagccgagcaccaggcccatcagcatgaaaatccattgcatggtcgatatccctaggcaaaccgaggcctagtatatccacgcggacctaatgtggtagcgggcttgtgtgggagccgggcttgcccgcgatgcagacacctcggtgtttcagtcacaccacggtgatgctatcgcagcggtgcgacgattcgacaagccagctcccacacaagcccgctaccatttagtcgagggctttccagatctcggtcgcgtattcgcggatggtccggtccgaactgaaccagcccattcgcgcggtattcagcactgccgaacgccaccacgccttggaatcatgccaatgcgcttcgacccgtgcctgggcgtcccagtaggagtcaaagtcggcacacaccaggaaacggtcgtagtcgatcagcccgtcgatcaggcccacatagcgacccggatcatccggcgagaacaccccgccacggatcgcttgcagcacatcattgaggcgatgagacgcggcaatgtccggccccgcgttgaactcgccggcgtgcttgcgcgcttccacctgttgcgcactgaggccgaagatgaacatgtgatcggcgcccacgcgctcgtgcatttccacgttggcgccgtccatggtgccgatggtcagcgcgccgttgaggccgaacttcatgttgctggtgccggaggcttcaaagccggcggtggaaatctgctccgacaaatccgccgccggaatgatgctttccgccaggctgacgttgtagttgggcaggaacaccaccttcagcaggccacgaacggtcgggtcgttgttgacggtgcgggcgatgtcattggtcagtttgatgatcaatttggcctggtgataactggccgccgccttgccggagaagatcttcacccgtggcacccagttggtgcccggctcggcacggatcgcctggtacagcgccacggtgtgcagcaggttcagcaactggcgcttgtattcgtggatgcgcttgacctgcacgtcgaacatcgccgccgggttgaccgcaatacccaggcgctcgtggatgatctcggccagtgcacgtttactgtgcaggcgctgctcggcaaagcttttgcggaaggcctgcttctcggcgaagggttcaagttcgaccaaacgctgctcgggctgatcaagaatgtccgggccgagggcttccaccagcatctcggtgagtttggggttggcctggtacagccagcggcggaaggtgatgccgttggttttgttgttgatacggtccgggtagagcttgtgcagctcggagaacaccgtgctgcgcatcagttgggtatgcagcccggatacgccgttgacactgtgggaaccgagaaacgccaggttgcccattcgcacgcggcggccgttgtcttcttcgatcagcgacacagcgcgcagcacgtcgaaatcgtggatgcctttggcgcgcagcgagtcgatgtgctgggcgttgatcaggtagatgatctgcatgtgccggggcagcatgcgttccatcaggcctacaggccaggtttccagggcttcgggcaacagcgtgtggttggtgtaggaaagggtttcgacggtgacgtcccacgcggcttcccacgggatgtcgtgcaaatccaccagttggcgcatcagctcggccacagcgatggacgggtgggtgtcgttaagctggatcgcggcgtgctcgcccaggctcaacaccgagccgtgcatgttcttgtggcggcgcagcaggtcttgcaaggaagcggagacgaagaagtattcctggcgcaggcgcagttcctgccctgcttcggtgctgtcggccgggtaaagcacgcgcgagatgctttcggcacgggcgacttcggcaacggcgcccaagtggtcaccggcgttgaaacgctccaggtgcaggtcctcaaccgcgcgggcacgccacagccgcagggtgttgacgctggcaccgcgccaaccgactaccggggtgtcgtaagcgaccgcacgcacggtttcgttgggcgtccacacttgaatcatcttgccggaggcgtccgcgagggtttcgacgctgccgccaaagccgatcgggtagatcacttcggcccgctcgaactcccacgggttaccgaaatccagccaacgctcggtctgctcctgctgccagccgtcgacaatcgcctggcgaaacaggccgtgctcgtaacggatgccataaccatggccggcgatgcccaaggtcgacatgctttccataaagcacgccgccaggcggcccaggccgccgttgccgagggccgcgtcgggctccagcaggcggatgcgctccaggtccacgccgagctccaccagcgcttcgcgggcgatttccagaatgccgaggttgctcaggctgtcgtagagcaggcggccgatgagaaactccagggaaaggtaataaacccgcttctggcctttgcggtaaatgcgccgcgtgtggtccatccagtgatcgaccatctggtcgcgcgcggccagggcaatggcttcgaaccagtcgtggtcgaaggcgtggtcggggtctttgcccaccgcgtaggtgagtttggtcaagacagcctcgcgaaatgcggctacctctgcttctcgtgcaagcggttcctgagacatcgatgcgacctcgggcgagattgaaggagttgctagagcctagtcggtctgacagacggtagacgctctggttcggcagttttttaactcattcacgtttaccggttttagatgcaggggccgtgcccgatcacgcattttccaaacctttgggctgaaacccgcaaaatattgttcaaaaaaccaccaaccccggtatgatcgcgcgcccggatacagccccaccttttggaaccctgatgaagcctcaactgatcgccgccgcggaactcgaccgtcttgaaacgtggcagaaatactccgcgcacatgtgcggcggctgcgtgtccagctgctgcacgctgccggtcgaagtgaagatcaaggacctgatccgcattggcatcgtcgatgaattcgagcgcggtgacccgccgaagaacatcgccaagcgtttgcagaaagaaggcatcgtggagcgcttcaattccaaatccgaaatttttaccctgcagcgcatgagcaacaacgactgcctgtacctggatcgtaagacgcgcttctgcactatttatgacaagcgcccggatacctgccgcaaccacccgaaaatcggtccgcgcccggggtattgcgcgtacaagccgaaggaagtggtgcgcgagaccaagttccggaccctcgacaagttctgatccaagttatgtagtgcctttaagggccctatcgcaggcaagccagctcccacattttgaccgtgtgaaccgatcgagtgtgggagctggcttgcctgcgatggggccagcagagacaacacacaaactgcaggcacaaaaaaacgcccccggcctttcgaccgggggcgtttttattcagcctgagttaactcagttcttggctttcttggcagcgcgggtacgctcgccttcgtccaggatcttcttacgcaggcggatcgacttaggcgtaacttcgcacagctcgtcgtcctggatgaattccagagcctgttccagggtgaagcgaacaggtggaaccagagcgatggtttcgtctttacccgaagcacgcatgttgtcgagcttcttgcctttggttgggttgacgcccatgtcgttgtcacggctgttcagaccaacgatctgaccgttgtagatctcttgaccgtgttcaacgaacagcttgccacgcgcctggagggtttccagggagtaggtcagtgccttgccggtttctaccgataccagaacaccgttttgacggccggacatgtcgccggacttcatggtgtcgtagcgatcgaagatcgaggtcaggatgccagcaccgttggtcagggtcaggaactggttacggaaaccgatcagaccacgagcagggatgttgtattccagacgcacacggcctttgccatccggcaccatgttggtcaggtcgcctttacgcagacccatctcttccatcaccttgccctgggattcttccggggtgtcgatggtgacgttttcgaacggttcctgcttcacgccgtcaacctgacggatgatcacttctggacgaccaacgcccatttcgaagccttcgcgacgcatggtttcgatcagtaccgagaggtgcagctcaccacggccggaaaccttgaacttgtcagccgagtcgccttcttcaacgcgcagagcaacgttgtacagcagctctttgtccagacgctccttgatgttacgggaggtcacgaacttgccttctttaccgcagaaaggcgagtcgtttacctggaaggtcatggaaacggttggctcgtcaacggtcagaggcttcatcgcctcgacgttgtctggctggcacagggtgtcggagatgaacagggagtccataccgctcacgcatacgatgtcgccggcaaacgcttcttcaacgtcgatacggtgcagaccgtggtgacccatcagcttcaggatacggccgttgcgtttcttgccgtcggcgccgatggcgacaaccggagtgttcggcttgacgctgccacgagcgatacggccaacaccgataacacccaggaagctgttgtagtccagtgccgagatttgcatctggaacgggccttcacggtcaactttcggcgcaggtacgttgtcgacgatcgactggtacagcggggtcatgtcttcagccatgtcggtgtgttccagaccggcaatgccgttcagggccgaggcgtagacgactttgaagtccagctgttcttcggtggcacccaggttgtcgaacaggtcgaagatctggtccagaacccagtccggacgcgcgcctggacggtcaaccttgttgatgcacacgatcggacgcaggccggcttcgaacgctttcttggtcacgaaacgggtttgcggcatagggccgtcttgggcatcgaccagcagcagaacggagtcaaccatcgacattacgcgttctacttcgccgccgaagtcggcgtggcccggggtgtccacgatgttgatgtggtagccgttccagttgatggcggtgtttttagccaggatggtaataccgcgctctttttcctggtcgttggagtccatcacgcgctcgtcgttgagctcgttgcgctccagggtgccggattgacgcaggagtttgtctaccagggtggttttaccatggtcaacgtgagcaatgatggcgatgttacgtagattttcgatcacttgtgtatctcgatcagaggattcggtgtgctgacaggtcgtggcagcgattaacagtagagtcaggccttgccgttacagcttgacggcagagtcggggggccggtgacgcaggccacaggcaaacagccccgggctcttagctcggtcgataaacgcgcacattggcatgcccctcactgagcaaatggtgggcatgcaggcgactcatcacgcctttgtcgcaatacaacaggtactgacggctgttatccagttccttgaaacgcgcgttcagtgcgtagaacggcagcgtttgcacgtcgatgccagcgatttccagcggctcatcttcagcggcatccgggtgacggatgtcgacgacaatctggcccgccagggcttcgctgacttcttcgatttgcacatcctggcccaattcgtcgatcacacgatcgattggcaccattttggcgttctcgagcgcacgctccagaatcgccatgtcgaactgttgttcttcgtactccacgcggttgcgcttggcgtgggtcttggggttcaccgagatgaccccgcaatattcaggcatgtgcttggcaaaatccgccgtgccgatttcttcggccaggtcgatgatgtcctgcttgtggctggcgatcagcgggcgcaacaccagcttctcggtcacgcagtcgatcagcgacaggttcggcagcgtctggctggagacctgggaaatcgcttcgccggtcaccagcgcgtcgatctgcaactgatcggcgatcctggacgcggcgcgcaacatcatacgcttcaataccacgcccatatgactgttatcgactttgccgagaatttcgccgagcacttcttcaaagggtacgctgacaaatagcacgcgttgggagctgccgtacttcttccagatgaagtgcgcgacttccattacgcccaattcgtgtgcacgcccgcccaggttaaagaagcagaaatggctcatcaggccgcggcgcatgatctggtaggccgccaccgtggaatcgaaaccgccggacataagcaccagggtctgttccagggcgcccaaggggtagccgccgatgctgttgtgctggctgtggatcacaaacaaccgttggtcgcgaatttccatgcgcacttcaatttgcggcgctttcagggaaattccggcggcgccgcactcgcgacgcagcttgctgccgacgtatttctcgacatccatggagctgaaggtgtgcttgccggcacgcttgcagcgcaccgaaaaaatcttgccttcgatctcgtggccgtagtgctgtttgcacttctcggtgatgtcgtcgaagtcgcccagcgggtactcatccacctgcaggaaatgcgcgatgcccggcatgcagctcagccgctcggtcatgtccttcaaggctttggcgtcggtaatgcgggtttccagctcgaggttgtcccacacgccgttcaccaccacagccgggtccaggtcacggagcacggcgcggatgttcttggccaattgacggatgaaacgcgtccgtaccggtcggcttttgatggtgatctcggggaagacttttacgattaatttcatggaaacagcgcgcgccgggcctgctgaaaaaggggggcgcggattatagcggaaatcgctcaaggtttaaccagttaatatgcaacgccattcgagcgcaccaaaacgggtcatttgcgcaaataaacgctacattgcagtgcgctttttattccgcttcagcggattgcacctttataggggccattttgaggcaaaaaggccatgttggcgcactggcatgcaatttgctctcttgtgaggcaggttgccttggtcgagtattcgcgccggcatcacccacattctaagggctaactccactaccccagcccgaagccacccggaggacaccatgtcgaagtcggttcaactcatcaaagatcatgacgttaaatggattgatctgcgcttcacggacactaaaggtactcagcaccacgtgaccatgccggctcgcgacgcgctggatgatgctttcttcgaagaaggcaaaatgttcgacggctcctccatcgctggctggaaaggcatcgaagcttccgacatgatcctgatgccggacgacagcactgccgtgctcgacccgttcaccgaagacccaacgctgatcatcgtctgcgacgtgatcgagccttcgaccatgcaaggctacgaccgcgacccacgtgcgatcgccaagcgtgccgaggaatacctgaagtcgaccggtatcggcgacaccgtattcgtaggcccggagccagaattcttcatctttgattcggtcaagttcaagtccgacatctccggctccatgttcaaaatcttctccgaacaaggttcgtggatgtccgaccaggacgtggaaggcggcaacaaaggccaccgtccaggcatcaaaggcggctacttcccggttccaccgttcgaccacgaccacgaaatccgtacctccatgtgcaacgccatggaagaaatgggcctggtcatcgaagttcaccaccacgaagtggcgactgccggccagaacgaaatcggcgtgaagttcaacaccctggttgccaaggctgacgaagttcagaccctgaagtactgcgtacacaacgtggctgatgcctacggccgtaccgctaccttcatgcctaagccactgtacggcgataacggttcgggtatgcacgttcacctgtccatcgccaaagatggcaagaacaccttcgctggcgaaggttatgccggcctgtccgacaccgccctgtacttcatcggcggtatcatcaagcacggtaaggccctgaacggcttcaccaacccgtcgaccaactcctacaagcgtctggtcccaggtttcgaagcaccggtaatgctggcctactcggcgcgtaaccgttccgcctcgatccgcattccttacgtgtccagccctcgcgctcgccgtatcgaagcccgcttcccggatccggcagccaacccatacctggccttcgctgccctggtaatggctggcctggacggtatccagaacaagatccaccctggcgatgctgccgacaaaaacttgtacgacctgccgcctgaagaggccaaagagatcccacaagtgtgcggcagcctgaaagaagccctggaagaactggacaagggccgcgcgttcttgaccaaaggcggcgtattcagcgacgacttcatcgatgcctacatcgagctgaaaagcgaagaagaaatcaaggttcgcaccttcgtacacccactggaatacgagctgtactacagctgctgatccggaagcgccgcgtgaagtggcgtgatgaaaaaagaccgccttcgggcggtctttttttgcctgggatttagttgaccggaacctgaaacgaatgaaaattgtgggagctggcttgcctgcgatagcgcaccaccagccacctgatgtatgactgatacaccgcaaatcgtcgcaccgccgcccccacaggagatcacccttgaagtttcgacttgtgttcgctctgttatttttcagtgctacagcaaacgcagcgcccgccaccctcgaaccgctgctcaacagcatcgccgaacgcctggccatcgccgaccaagtggccctgagcaaatgggacagccacaaggccgtggaagaccgcccccgggaacaggccgtgctcgccagcgtgagaacccaagcccccggctacaaactgacgcctgaggcggccgagcagtttttctcggcccagatcgaggccaataaactggtgcagtacacccacctgtccgactggcacttcaagggcaaggcacccgaaaccccgcgcccggacctggtcggtaaaattcgcccggcgctggatgagctgcaaaaacatctactgcaacaactggccgacttcagccccgagcgcaccaacccgcagtgcccgcaatgggtagctcaggccgtgcaccaaccgctctacgacccgctgcagcaaatcgcgatgacccgcgccaccgccgagctgtgcacctacaaaggctaaagcctgcaaacccactcgaacctgtgggagctggcttgcctgcgatagcgccggcacattcaacactgctatcgcagcggtgcgacggttcgacaagccagctcccacattgacccaagttctccagacagtttctcgccaaccctgacttcctgaacaagctttcaaaaaccgcactatattggtgcgacagactgcaccctacccacccaatcagcccattttggttcgaaacttcccgagcaagctggcataacgccacagtttcgcgcctcaaacgcccatttcaggggtttcgcgcttcttttcggagccttggtttggtttttgcattttccttgtatcagcgtgtgcccgaagcctgcgccttgctccaaaagaggtcccgatgaccatcagcgatgcactgcaccgtttgttactcgacaacctgaccaccgcgaccatcctgctcaacgacgacttgcgtcttgagtacatgaacccggcggcggagatgctcctggccatcagcggccagcgtagccatgggcagttcatcagcgaattgttcaccgagtccgccgaagccttgagctcgttgcgccaggccgtggaacaagcgcaccccttcaccaaacgcgaagcgatgctcaccgccctcaccggccagaccctgaccgtcgactacgccgtaaccccgatcctgagcaacggcgccaccctgctgctgctcgaagtgcacccgcgcgaccgcctgctgcgtattaccaaagaagaagcgcagctgtccaagcaggaaaccagcaagatgctggtgcgcggcctggcccacgagatcaagaacccgctgggcgggattcgcggcgccgcgcagctgctggcgcgcgaactgccggaggagcatctcaaggactacaccaacgtcatcatcgaagaagccgaccgcctgcggaacctggtggaccgcatgctcggttccaacaagctgccgtcgctggcgatgaccaatgtgcacgaggtgctggagcgcgtttgccagctggtggaagcagaaagccaaggctgcatcaccctggtgcgcgactacgacccgagcattccagacgtactgatcgaccgcgaacagatgattcaggctgtgctcaatatcgtgcgcaacgccatgcaagccatcagcagccagaacgagctgcgcctgggccgcatcagcctgcgcacccgcgccctgcgccagttcaccatcggccatgtgcgccatcgcctggtgaccaaggtcgagatcatcgacaacggcccgggcattcctgcggaactgcaggaaaccatctttttccccatggtcagcggccgcccggacggtaccgggctgggcctggccattacccagaacatcatcagccagcaccagggtctgatcgagtgtgaaagccatcccggccacaccacgttctcgatctttctgccactggaacaaggagccccatcgacatgagccgtagtgaaactgtctggatcgtcgatgacgaccgttctatccgctgggtcctcgagaaagccttgcaacaggaaggcatgaccacccagagcttcgacagcgccgatggggtgatgagccgcctggcgcgccagcagccggatgtgatcatctccgacatccgcatgccgggcgccagcggcctggacctgctggcgcggattcgcgagcagcacccgcgcttgccggtgatcatcatgaccgcgcactcggacctggacagcgctgtcgcgtcctatcagggcggtgcgtttgaatacctgcccaagccgttcgatgtggacgaagcggtggcgctggtcaagcgcgccaaccagcacgcccaggagcagcaaaatcaggaagccccaccggccctgacccgcaccccggaaatcatcggcgaagcaccggcgatgcaggaagtgtttcgcgccatcgggcgtttgagccactccaacatcaccgtgctgatcaacggcgagtccggcaccggtaaagagctggtggcccacgcgctgcaccgccacagcccacgggcggcctcgccgttcatcgcgctgaacatggcggcgattcccaaggacctgatggagtccgagctgttcggccatgagaaaggcgcgttcaccggtgcagccaacctgcgtcgcggccgctttgaacaggcggatggcggtacgctgtttctcgacgaaatcggcgatatgccggccgacacccaaacgcgcttgctgcgcgtgctggccgacggtgagttctatcgcgttggcgggcacacgccggtcaaggtcgacgtgcgcatcatcgccgcaacccaccaaaacctcgaaaccttggtgcacgcgggaaaattccgtgaggacttgttccaccgcctcaacgtgatccgcatccacattccacgtatgtcggaccgtcgcgaagacatcccgacgctggcccgccacttcctcagccgcgccgcgcaagaactggcagttgagccgaagctgctgaaaagcgagaccgaggaatacctgaagaacctgccgtggccgggcaacgtgcgtcaattggagaacacctgccgttggatcacggtgatggcgtccgggcgcgaagtacacatcagcgacctgccgccggagctgttgagcctgccgcaggattcggccccggtgaccaactgggagcaggcgctgcgtcaatgggcggatcaggcgctggcacgcggccagtcgaacctgctcgacagcgccgtgccggcgttcgagcggatcatgatcgaaaccgccttgaagcacactgccggccgccgccgcgacgccgctgtgttgctgggctggggccgcaataccttgacgcgcaagatcaaggaattggggatgaaggtcgatggtggggatgatgatgaaggtgatgaggcttaaatcccaaatccactgaaattccaatgtgggagccggccttgtgtgggagctggcttgcctgcgatgcagtcacctcggtgtgtcagtcacaccgcagtgatgctatcgcgggcaagcccggctcccacatttgttttgtgctgcgacaactaccgtgcaccgcttcaatgcaccacgaaccggcatcgggcacggacccaacacctgaaacacccgcccaattaagaaaatattaaaacccgaaaacaccaaagccccgtattccggggctttgcgctttctggcgtaattttttggcacacactgccaactctggcacgcgccctgcaataccccttatacaacccagtttcggggaccttggtacaggcaggccgagaatcccctctttacacccggggtgcttgatgcgaaccgcgtcgcgctccacaccgctttggggaaccccggtacaggcaggccggggactccctctttaacaccgaagcctttaaggcttcaccccgttttgggagccctggtacaggcaggccgggaactcccttctttacacccggggcttatgcggcacagcgcccatagccccagcccgttttgggaaccttggtacaggcaggccggggattccctcttttattgctcttggagatggacctccagccgccagcggccatcaaccttctcccccttccactctccatgcaacggccgagccgccaccaggttcagcagcaagccgccatcggtcttgcgcacgcgccaattcacgtccttgtcattgaccttgagttgcccgctggcggctttgccctgggcatcgaacagaagagccacggtgccgtcgacgtgctcgccgtgcagcttaggtttgctgttgaaccacaccaccacaccgtctgccgcaatctcgacctgttgcagctcaatggggtccggggtggtcaggcggccgatcatcaggccgatcatcagccccacaatcgccaaagagcccatcacccgcggcaatagcttcggccttgggtcgtcttcaggggtagaatgcagcgcatctttgccttcggagccgtgcatgtttcacgtcatcctttttcaaccagaaattccgccgaataccggcaacgttatcaggctgtgcgccaacagtggctgccacctgcatttgatcgagccgttgggcttcgacatggacgacaagcgcctgcgccgtgccgggctggactaccacgagtacgccaccttgcagcgccacgccgatttggccagctgcctggaaagcctgggccacccccggttgttcgccttcaccaccaagggctcgcagccgtttcatgatgtcagctttgccgaaggtgatgccttcctgttcggcccggaaagccggggcttgccggctgaagtgctcgatgcactgcctgaaggccatcgcctgcgtttgccgatgcgcgaagggtgtcgcagcctgaacctgtccaacaccgtagccgttgccgtctatgaaggctggcgccagctcggcttcaaataacaccccaaaacaaatgtgggagagagctcgtgtgggagctggcttgcctgcgatcgcatcacctgggtatcactgatacaccgaggtgtctgcatcgcgggcaagcccggctcccacacaagccccctcccacatagggtcctgcgtcgggttcgagcttactgaacggtcgacgaaccttcctgttgcatgcgctgcagctcttgcgcgtacagggcatcgaagttcaccggagccagcatcagcgcagggaacgagccacgggtgaccaggctgtccagggtctcacgggcatacgggaacaagatgttcgggcagaacgcgcccagggtgtggctcatggacgcttcgtccaggccctggatcaggaagataccagcctgttgcacttcagcaatgaatgccacttcttcaccgttcttgacggtaacggagagggtcagcaccacttcgtggaagtcaccttccagggctttttgacgggtgttcaggtccagcgcaacgcttggggtccattcctgacggaagatggccgggcttttcggcgcttcgaacgacaggtcacgcacgtagatccgctgcagcgaaaactgtgggccttgagcttctgctgcttcggtgttctgttggtcagtcatcgcagatccttcttgatcttggggtcttttagggtttaggagtcagacgagcagcagcgcatcgagtttaccggcgcgctccagggcgaacaggtcgtcgcaaccaccgatatgccgggcgccgatccagatctgcggcacggacgtgcgccccgccttctgggccatctcggcgcgcacctggggtttgccgtcgaccttgatttcttcgaaggcaatgcccttcttctcaagcagggccttggcccgcatgcagtaagggcaccaatcgctggaatacacgacaacctgactcatatcacttcaccagcggcaggttatcggccttccagctgccaataccgccggacagtttggcggcagtgaaaccggccttgagcatttcacgggcgtgggtgccggcgtgctggccttgggcgtcgaccagaatgatggtcttggctttgtgtttttccagctcggccaagcgcgcgatcagcttgtcttgtggaatgttcagggcgccaacgatgtggccgccggcgaaatccttggctgggcggatgtccacgacaacggcctcatccttgttgaccagtgcggtcagctccgacgtgctcaggctgcggccaccgcggctcatttcgtgagcgatcagcagcgccagcaggatgacgaaggcacccgcgagcaggtagtgggcagtggcaaatgcaatcaggtgatcaaccatcaaggaggttccagggcgttaaaatggcggtaagtatacacagccgtccgggggggccaacccccgtaaagcggtgacgtggttggaacttcgctttaaactgccactcccttttcaattgtcttcctttattacgccgcgagaggatctatgactactacgcctaaacctttggtcctgataattctcgatggcttcggacacagtgaaagccaccacgacaacgccgtgtactcggccaacaagccggtcctggaccgcctgaccgccaccgtaccgaacggtttgatctcaggttccggcatggacgtcggcctgccggacggccagatgggcaactcggaagtcggccacatgaacctcggcgccggacgagtggtataccaagacttcacacgcgtgaccaaatcgatccgcgatggcgagtttttcgagaacccgaccatctgcgccgcggtagataaagcagtggccgccggcaaggcggtgcacttcatggggctgctgtcggacggcggcgttcacagccaccaggaccacctggtcgccatggccgaactggccttcaagcgcggcgccgaaaagatttacctgcacgccttcctcgacggccgcgacaccccgcccaaaagcgcgcaatcgtctatcgagctgctcgacgccacgtttgcagcgctgggcaaagggcgcatcgccagcctggtcggccgttacttcgccatggaccgtgacaaccgctgggaccgcgtttcccaggcttataacctgatcgtcaacggcgaatccgagttcaacgccgccaccgcccagcaaggcctcgaagccgcctacgcccgtggcgaaagcgacgaattcgtcaaagccaccaccatcggcgagccagtgaaggtcgaagacggcgacgccgtggtgttcatgaacttccgcgctgaccgtgcccgcgaactgagccacgtgttcgtcgacgccggtttcaaggacttcgaacgctcgcgccagccgaaaaccgaatttgtgatgctcacccaatacgccgccaacatcccggccccgtcggcctttgcgccgggcagcctggacaacgtgctgggcgactatttggcgaaaaacggcaaaacccagctgcgcatcgccgaaaccgagaaatacgcccacgtgaccttcttcttctcgggcggtcgtgaagaacccttcccgggcgaagaacgcatcctgatcccgtcgccaaaagtcgccacctacgacctgcaaccggagatgagcgcaccggaagtgaccgacaagatcgtcgacgccatcgagcaccagcgttacgacgtgatcgtggtcaactacgccaacggcgacatggttggccacagcggcaacctggaagcggcggtcaaggcggttgaatgcctggacctgtgcgtcggccgcatcgttgacgcgctggaaaaagtcggcggcgaagcgctgatcaccgccgaccacggcaactgcgaacagatgtccgacgagtccaccggtcaggcccacaccgcgcacaccaccgagccggtgccattcatctatgtcggcaagcgcgacttgaaggtccgtgaaggcggcgtgctggcggatgtggcgccaaccatgctgaagctgatggggttggagaaaccgaaagagatgaccggcacgtcaatcctggtctgaccctcacaagcaccgcaagcccctgtgggagctggcttgcctgcgatagcatcaactcggtatttctgaagcaccgaggtgtccgcatcgcaggcaagccagctcccacagggttaagaggtgctttttagcatgtctttttgccatacccccgccactcggcacctatcttgccctccagcccgaattgggcgttttttttgctgcgcttggcgggcatactaggccgtccctttccctggtgtcgcccgcctctatgcttcgcgccttgattaccctcgctcttgtctgcctgctccaaccggcgtttgccgatgagcgcgcacaaacccaacaacagttggacgctacgcgtcaggacattaccgagctgaaaaaactgctcggcaagctccaggaagaaaaatccggcgtgcagaaagacctgcgcggcacggaaaccgaaatgggcaagctggagaagcaggtccaggagctacaaaaagaattaaagaagagcgagtcggaactggagcgactcgacggtgagaaaaaaaaactccagagcgcacgcgttgaacagcaacgcctgatcgcgatccaggctcgcgccgcctaccagagcggccgccaggagtacctcaagctgctgctcaaccagcagaacccggaaaaattcgcccgaaccctgacttactacgactacctgagcaaggcgcgcctgacgcaattgaagggttttaacgaaaccctgcgccaactggccaatgtggagcaggaaatcactgaccagcagtcccagctgaacgatcaaaaaagcgcactcgacgcccagcgcgaccagctcgacaaggtgcgcaaggaacgccaggtggctctggccaagctcaatgacgacgtaaaagcccgcgacgccaagctccaagcccgcgagcaggaccaggccgacctggccaaagtgctcaaaaccatcgaagaaaccctggcccgccaggcacgtgaggccgaagaagcgcggcaaaaagcgctgatcgcccagcaggaagccgaaaaaaagcgccagcgtgaggccgaactggcagccaccaccgacgctccagcgccacgcaaacccgcgcatgcagcgcctggcccgctggtttccagcagcggcgagtcattcggcgggccgtttgcttcagcgcgcggcaaacttccatggccagttgatggtcgattgctggcacgctttggtgaaacccggggcgatgacacgcgggccaagtgggatggggtgatgatcagcgccgccgccggcagccaggtccacgccgttcacggcgggcgcgtggtgtttgccgattggctgcgcggtgccggtttattggtaattcttgaccacggtaatggctatttgagcctttatggccacaatcagactttactcaagtcggcaggtgatgttgtaaaagccggtgaatccatctccactgtcggtaacagtggtggccaggacaccccggcgctgtactttgctattcgtcagcagggtcgcccgagcgatcccgcacaatggtgccgttcccaaggatagggccgcacctacattaggagttcgttcgacatgctgcatttgtcccgcctcacttcgctggccctgacgatcgccctcgtgatcggcgcgcccctggctttcgccgatcaggccgcacctgcggcgcctactgctacagccgcgaccaccaaggccccgctgccgctggacgagctgcgcacctttgccgaggtcatggaccggatcaaggcagcctatgtcgaccccgtagacgacaagacactgctggaaaatgccatcaagggcatgctcagcaaccttgacccgcactccgcctacctgggcccggaagacttcgccgagctgcaggaaagcaccagcggtgaattcggtggcctgggcatagaagtgggctctgaagacggcaacatcaaagtggtgtcgccaattgatgacaccccggcgtccaaggccggcatccaggcgggcgacttcatcgtcaagatcaacggccagccaacccgtggccagaccatgactgaagccgtcgacaagatgcgcggcaagctcggccagaaaatcaccctgaccctggtgcgcgacggcggcaacccgtttgacgtgaccctggcccgcgccacgatcacggtcaagagcgtgaaaagccagttgctggagtcgggctacggctacatccgtatcacccagttccaggtcaagaccggcgacgaagtagccaaggccctggccaagctgcgcaaggacaacggcaagaagctcaacggcatcgtgctcgacctgcgcaacaacccgggcggcgtgttgcaggcagcggtggaagtggtcgaccacttcatcaccaaagggctgatcgtttacaccaagggccgtatcgccaactccgagttgcgcttctcggccaccggcaacgacctcagtgaaggcgtgccactggcggtactgatcaacggcggcagcgcctcggcctcggaaatcgtcgccggcgccctgcaagaccagaaacgcggtgtactgatgggcaccaccagtttcggcaaaggctcggtgcaaaccgtgttgccgctgaacaacgagcgtgcgctgaagatcaccacggcgctgtactacacgccgaacggccgctcgatccaggcccagggcatcgtgccggatatcgaagtgcgcaaggccaagatcaccaacgaggtcgacagcgagttctacaaagaggcggacctgcaaggtcacctgggcaatggcaacggcggcgccgaccagccaaccggcagcggcgtcaaagccaagccgatgccgcaggacgatgactaccaactggcccaggcgctgagcctgctcaagggcctgagcatcacgcgcagccgttgatatgcggtttgccctgatcctcgctgtgctgtgcagcctggccggcgtcgcccatgcggccccggctggcgagccgtccaaagcctacctgaccctcatcatcgacgacctggggcaaaacctgccccgggaccgtcgtgtactggccctgcctgggccggtgaccacggcgatcatgcccgacacgccccacgccgctgaattcgcccgagaggcgcacaaggccggcaagatcgtgatcctgcacatgcccatggaccccgccaccggcccgtttgcctggcacccggaactgcccatcgaagaactcggcaaacgcctggacgccgccttcaaggccgtgccctacaccgccggcatcaacaaccacatgggcagccgcatgaccgcacagccggcagcgatggcctggctgatggccgagctgcaacggcgcaacaagttctttgtcgacagccgtaccagcgcgcaaaccgtcgccgccgccgaggctcagaagattgggctggcccatgtctcacgggacgtgttcctggatgacgagcgcactgaggccgccatcgccacgcaattgcagacggcaatcaagctggcccataaacagggttcggcggtgatgatcggccacccttacccgcaaaccctcgcggtgctggagcgcgagctgcccaagctcaaggcccagggtgtggactggattgatatcaagttgatgatcagtgtgcgcagtaatcaagcgatggcagcacacggaaaaaacggcacctatcttccggcgcgtagatagataccgcccggccccgcacgcactcctagatagttcaagtttctatctactggagagccctccatgaaccccctgcaattcaacgacctgctcatcagctttaccagtgagtttctgcccctgtggaatgacaaggggtcgggtgcacgtagtgctgtcagcctctggcgccccagcacagcatccgatgcactcaacccgtttttttccctgggcgatattgcggtcaatcactatcgcaacatcaatcagcgcaaggtggtcgctgtggtcagcgacgccaacaaggtcgagggtaccgccctgcgcccgccggtcgattaccaactggtgtggcacgatgaaggcaccggcgcgcgcagtaacgcgtctatctggcgcccaataccaccagagggttatgtggcgatggggctggtgtacggcgtgaactacgacaagccctcgcgccacgccgtgcgctgtgtccgtgaagacctggtggtgccgtccaaagtcggcgagctgatctggaacgataaaggcagcggctccaccaacgatttgagtgcctggtcgatcacccctcacgacgcacctgcgggagagatctacttggcccccggcaccttcaccgccagtaacagctatgccaggccaaacattgcgacctattcactgcgactgataccgggcatgcaactcaacgacctgccgccaccaccggctctcatcgggcatgaaagccctgcccttgacgaaaccagcaccacccttcatgtgtgcgagttgccgtggttttgtgtcagagatcccgaattgacggcgttcgaacaatttcagtcttcgccggtttaccggctggagcgcagtgatcagtacctgctcgcaggcttcgggcacaacaccgaaaccaccaaccagccgttcatgtggaccgccaccaaaggcgagcagggaaggcatgccaaggccctggcatacaacgccaatgtggacctgagcaaagaatggccggtgtacgcgcatgcctttgagctggcgttctcggcgcatctggatcgaaacttcacccatacccaacgttcggcgaaaggctggggccacccttcgctactggaagtcatcacttacgttgcaccggacaaggccgttgcggcctaccttctgcacagtgaataccgcctgctgcgccaggatggcagccaagtgtcggccactgtcagctacaccaatggtgatcacgtgtacctgagtgaatcccgggatgcgcagttgcaacccgaagaaacacttcctccctcgaacgcacctgaaactgagccagtgtcagcgccagagctacaggtaacgagctacgatctcttcgacgacaccctgactccgtaattgatcgagtgccgcctggagcttggccaccacgtcgtccggcacctctttgttcagtgccaggtacaactgggcgctgttgaaacgcaaaacggttttgagttgggtcaccccgacctggcgagccagataacggcccgccgggtcgccggtggcccacaggtctatctggccttccatcagcttttgcgcgttgtcctgatcgcgcagcgccacgatcgggttaagaccctgtttctccagagtctcggcgatggcgtctcccttataggcgccgatcttgaaacggcgcgcatgctcaaggtcagccagttcaatcttgctgtcagccttggcgagcatcacccaatcgtccgggccaatgggcccgacccatttgaacaaggcttcacgatccggcaggcgcgccatcacgaatacgccgtatccgggtttttccagggcgagtttgtagattcgctcccagggaaaacgcagggtcaggttgtaggaaataccggcgcgcttgaaggtctcgcgcacgatgtccacggcaatgccttcgatgttctcgtccttggcgaagttcttgccgtttttcgccatgttgtagggcgggaagttttccgtcagcaacaccagggaggcatcagacggcgcttcggcacgcgcggaacctgccaacaggatggaagtactggcgaaggcgagcagcaggtgtttgaacatgaagggtaccgaaatccatggcaagcgcagagagtgccccgcgcctgccagggtgtccagcagcgtttagcgaacgacgataccgcgcgccgccatgtaagccttggcctcgggaacggtgtattcgccaaagtggaaaatactcgccgccagcacggcgctggcatggccttcggtcacgccgtcagccaggtgctgcaggttgccgacgccaccggaggcaatcaccggaatgcccagtgcgtcgctgatggcacgcgtcacgcccaggtcgaagccgtttttcatgccgtcctggtccatgctggtcaacaggatttcaccggcgcccaggccttccattttcatcgcccactccaccgcgtccagcccggtcggcttgcgcccgccgtgggtgaagatctcccagcgcggggtttcgcccgggccggagactttcttggcgtcgatggcgaccacgatgcactgcgagccaaagtgctgcgcggcttcgccgacgaactccgggttgaacacggcggccgtgttgatcgagaccttgtccgcaccggcattgagcaggttgcggatgtcttgcacggtgcgcacgccaccgcccacggtcagcgggataaacacctggctggccatgcgttccacggtgtgcagcgtggtggcgcggccgtcgacgctggcggtgatgtcgagaaaggtaatctcgtcggcaccttgctcatcgtaacgacgggcgatttccaccgggtcgccggcgtcgcggatgttctcgaacttgacgcccttgaccacgcgaccgttgtcgacgtccaggcaagggatgatgcgtttggccagcgccatggtcagtcctcagccgttgtaggcgtcgcagtaagcctgggcttcggcgacgtccagggtaccttcgtagattgcacggccggtaatggcgccgatgatgccgggggccttggcgtccagcagcgacttgatgtcgcccaggttgtggatgccgccggatgcaatcactgggattttggtcgcggcggccagcgcagcggtgaacggcacgttgcagccctgcatcatgccgtctttggcgatgtcggtataaacgatggcggagacgccgtcggcttcaaactgcttggccaggtcgatgacctgcacggtgctgatttcagcccagccgtcggtggcgacgaaaccgtctttggcgtccaggcccacgatcaccttgcccgggaacgcgcggcaggcttcggcaacgaaggccgggtctttcacggccttggtgccgatgatcacgtagctcacgcccgctttgacgtagtgctcgatggtttccagggagcgaataccgccaccgatctggattggcaggttggggtagcgcttggcaatggcggtgaccacttcaccgttgaccggctggccttcgaaagcgccgttcaagtccaccagatgcagacgacggcagcccccttccacccatttggcagccatgctgaccgggtcatcggagaacacggtggaatcttccatgcggccttggcgcaggcgtacacacgcgccgtccttgagatcgatagcggggataatcagcatctggcaaaccttattcgatagtcagcaatgcttgggaaatcagggtttctcaagcgaccacaagtcgctttcgatgctttcgaacctttctttaaggagcgtctgcgtgtcgaaaatcgccttgttgtaatagtgcggcgcaacttcggtggtaaacagctcaagaatctcggcgacctcgaacgagcccagcttgagctcgaaacgatcctccatgaagcgcttgatcttgacggtagcctcactctcctgttcaggcgtgaggctcaagaccggcaacttcggcttcttggccattaccagcggccatcccacgcggcgaagttctgcagcaattgcaggccatgggtatggctcttctccgggtggaactgcacggcaaagcgcgaaccttcggccagcgctgcggcgaagtcgacaccgtaatgcccgccacccaccacctggcgcgggttaccggcggtgatgtagtagctgtgcacaaagtagaaacgcgccaggtccggaatgttgtgccacagcgggtgatccaccgcctggctgacttcattccaacccatgtgcgggactttcaggtgggcgccgtcttcgtgcaggtctttgccgaagaacttcacctggcccggaaacaggccgatgcagtccacgccgtcgttctcttcactgcgttcgagcaaggcttgcatgcccacgcagatgccgaggaacgggcgatcctggctgacttcacgcaccaggctgtcaaagcccaggcggcggatctcagccatgcaatcgcgaatcgcgccgacacccggaaacactacccggtcagcttcgcgaatcacattggcatcgctggtgatcagcaccttgccggcccccacgtgttcgagggccttggccaccgagtgcaggttacccatgccgtagtcgataaccgcgaccgtctgcattacagaacgcctttggtcgacggcatttgcccggccatgcggtcatcgagctccacggccatgcgcagcgcgcggccgaacgccttgaacacggtttcgatctggtggtgagtgttggtgccgcgcaggttgtcgatgtgcaggctgacgagtgcgtggttgacgaaaccctggaaaaattcctggaacaggtcgacgtcaaagccgcccacagtggcgcgggtaaaaggcacgtgcatctgcaggcctgggcggccggagaagtcgatgaccacgcgcgacagcgcttcgtccagcgggacataggcgtggccgtagcggcggatgcctttcttgtcgccgatagccttggcaaacgcctggccgagggtgatgccaacgtcttccaccgtatggtggtcgtcgatatgcaggtcgcccttgctgacgatatccaggtcgatcagcccgtggcgggcgatctggtccagcatgtgctcaagaaaaggtacaccgatatcaaatcgggcctttccggtgccatccaggttgatcgagactttaatctgggtttccagagtgtcgcgctcgacggataccttacgttcggccatcaccagctccgcaaaatcattgggcgaaaaaggcagccattataggggcgcgggcgccaaacagaaacatcggaggggataagactgatggagtgtcggggatagacatgtgcatacaagcaggcgctccaggatggtgcacccaactgctagctcaagacgagtagagatcaagtgtgggagctggcttgcctgcgatgcaagcacctcggtcgctcagccagaccgaggtgatgcttcgcgggcaagcccgctcccacagggttagtggaacagtactgcggttttctgcagagtcacccacacgccccacgccaacggaatacccaccaccagccaggcagcgatcgccaacggcacagtgccggaagccgctttccactcaagcgaggtggaagcatcagcacctttgtcgtggcccagcgcctgctcggcagccagttcggcatcggtcatgaagtacttgtccgccaccgggcgtaccagcaggttgcagatgaagcccagtaccagcaggccggcgaggatgtacaaggtgatgtcgtaggctgccgcgcgttcaacgccgatgctcaactgatactcacgcaggtagttcaccaacaccgggcccagcacgccagccgcagcccacgcagtcagcaggcgaccgtggatcgcgccaaccatttgtgttccgaacaggtcggccaggtaagccggaaccgtcgcaaaaccaccgccgtacatcgacaggatgatgcagaacgccgctacaaacagcgccacattacccaggtgccccaggttcgggatcagcgcgtacagggcaaagcccagtgcgaagaacacgaagtaggtgtttttgcggcccagatagtcagagaacgatgcccagaagaaacggccaccgatgttgaacaggctcaacagaccggtgaaacctgcagcgatggccgcgatggaagccagttggcccgcatccagttggccgaacggcacatctacgcccagcaacttgccaccaaacacttcctgcaacagcggcgaagccatgccgaggatgccgataccggcggatacgttcaggcacaacaccagccagaccaggcggaattgcggggttttccaggccacgttcacgtgcacatgacgatgggtaatcattgcgttgctggcttttttcgccggcgcggtccagccctcaggcttccagccggtcggcggaacgcggtacgacagtgcgccaccgatcatgaatacgaaatagatcacagccatgacgacaaagctctgccacacgcccacgctggtcggcgaagcaaagtggcccatcaaggctgctgcgagtggggcgccaaccatcgcgccgccgccgaagcccatgatcgccatgccggtggccatgccgcgcttgtccgggaaccacttgatcagggtcgagacgggcgagatgtagcccaggcccaggccgataccgccgatcacgccggagccgatccacatcagccagatctggtgggtatagatacccagcgccgagatcaacaggccgccacaccagcacagcgccgatacaacgccggccttgcgtggcccggcatgttccagccagccgccccagatcgctgccgagcagcccaggaagatgaagaacagggtgtagatccagcccagcatggagatgggccagtcacattgggacgaaaagatttgcgcgatgaaactcatgtccggcgcgcaggcgaccggtgcggtgatccccagggctttggacagtggcagccaaaacaccgagaaaccataagccatgccgatgcacaggtggatggccagggcggccggcggaaccagccagcggttgaagccgggcttggcgataatgcgctccttggacaggaacgcaggctgtgcggcagttgaacctgccacagtgctagtgctcattggtgtttcccccagttattagtatgtgcccgccaggcgctctctccctcggccttgcacgcaaagcgttggccgttgttgttgagtaaagctccatttaagcgcgacgttgtgtcgcagacgacagacgaacctgcgcagattagcacctgccgatgacagaaaaaccaaactgatatcacctttttcgcgttatctggtttgtttgacgccaaaatcctgttttgcacgccgcagatacaatgtaacgatccgtgaactgacgcacgccgcctggcgttatactctgcggctaaattttgaaatcgacatacaaggactcgcccatgaaagcgttcggcaaaatcctgggtctggtacttctcgggctgttgctgatcattgtggccctgggctttgccctgacccacctcttcgatcccaacgattacaaagacgagattcgccagattgcccgcgacaaggcccacatcgagctgacgctcaatggcgacatcggctggagcctgttcccgtggctgggcctggagctgcatgaagccagcgtggcgaccatgaccaacccgacccaaccgttcgccgacctgcagatgatcggcctgtcggtgcgcgtgctgccgctgctgcgccgcgaagtgcagatgagcgacgttcgcgtggaaggcctcaacctgcgcctgatccgcgacaagcaaggccacggcaattgggaagacatcggcaagaacgtgaccgaagcgactgccaatacgccagtgccagctccgacgcaaacaccggctgaacccgaaccggaaaaaccgccaaaaccgatccgcctggacatcgacagcctgaccatcaacaacgcccgcgttgaatacaacgacgagcagaccggcaagcagttcagcgctgaaagcatccagttgagcgccggcgctgtgcacgaaggcgccagcgtcccactcaagctcactgcattcctgggcagcaaccagccgctgatgcgcatcaagaccgagctgaacggcaatttgcgtatccagcgggcgttgcagcgctaccagttcgaagacatgaagctcagcggcgaagccaccggcgagccgctgcaaggcaagaccgtgaccttctccacccaggggcaattgctggtggacctggcggcgaacattgccgaatggaccaacatcaagctgtccgccaaccaactgcgcgccttgggcgaactgaaggtcaacgacctgagcaaaaccccgcaactgaacggcgcgctatccatcgcccagtttgatctggccaagttcctcgacagcgtcggccacccgttgccgccgatggccgagggcagcctgagcaaggttgaactggtcagccgcctcaagggcacgccgaccagcgccgctctggaagacctgaacctgaagcttgatggcagcaccttgaccggtcgcattgccgtggatgatttcgccaagcagtccttgcgcgtacagctcaaggccgacacgttcaacgccgacaactacttgccggtcaagtccgagtccgccaaaggcgccgccgctgcccgccaggccgaagtgcaaaacagcgagatgggcgccatggccgccggcggtaccacaccgctgccggacgcaccgaccaaaggcgcgtggagcaccgacaaactgttgccgctgacccgcctgcgcacccttgatgtagacgctgacctggcgttcggccaactgaccctgagcaagctgccgatccagaacgcggctctcaaagcctccggcatcgacggccagctcaagctcgacacactgagcggcggcctctacaacggcaccttccaggccaacggcacactggatgtgcgccaggacatcccggtgctggcactgcaaacccacatcaagcaagtgccgattgagcgcatcctgcaagcccaggggcaaaacccgccggtgaaaggccagatcacactcgacagcaacctcaccggccgtggcaacagccagaaagcgctgatcgacagcctcaacggcaccgcgagcttcgtgatcaacaacggcatgctgctcaacgccaacctggaacagcaactgtgcaccggcattgccctgctcaaccgcaagaccctgagcaccacgccgcaaggcaaggacacgccgttccaggaactgcgcggcaacctgaccttccgtaatggcgtggcgagcaaccccgacctgaaagtgcgtatcccgggcctgaccgtcaacggtaacggtgacgtcgacctgcgcgtgctgggcatggattaccgtgtgggtatcatcgtcgaaggtgaccagcgcgacgtgccggacccggcctgccaggtcggcaccaacttccagggcatcgaagtaccgctgcgctgccgtggcccgctggaactgggcgccaaggcctgccgcctggacaaggacggcttgacccaggtcgccgtcaaagccgccggcaacaagctcagcgagaagctggaagagaagctcgacaaggtcaacccacagctcaaagacgctttgaaaggcctgttcaaacgatgagaaacgagcagttttcgacggcggtgctcgactggtacgaccgccacggccgccatgacctgccctggcaacagggcatcacgccttaccgggtgtgggtttcggagatcatgttgcaacagacccaggtcagcacggtgctgaattacttcgaccggttcatggcgtccctgccaacggtcgaagcgctggccgccgcacccgaagatgaagtgctgcacctgtggaccggcctgggttactacacccgtgcacgcaacctgcagaagaccgccaaaattgttgtcgccgactatggcggcgagtttcccaaggatgtcgagaagctcaccgagctgcccggcatcggcctgtccaccgccggcgcaatcgccagtctgagcatgggcctgcgcgcaccgatcctcgacggcaacgtcaaacgcgttctcgcgcgctttactgcgcaagaaggctacccgggcgagccgaaggtggccaagcaactgtgggccaccgcagagcgcttcacgccgcacgaccgcgtcaacgcctacacccaggcgatgatggacatgggcgccaccctctgcacgcgcagcaagcccagctgcctgctgtgcccgctggaaaaaggctgcgaagcccacatgcttggcctggagacgcgttacccgatccccaagccgcgcaagaccatcccgcaaaagcgcacgctgatgccgttgctggcgaacgcagagggcgcgattctgctttatcgccgcccttcaaccggcctgtggggcggcctgtggagcttgccggagctggatgacctgcaagacctcgaacacctcgccaaccagcatgcactccatttgggagagcagcaggaattgccggggctggtccacaccttcagccacttccagctggccatcgagccgtggctggtgcaggtcgaggaaaccgcccatcacgtggccgaggccgactggctctggtataacctcgccaccccgccgcgcctgggccttgccgccccggtaaagaaactgctgaagcgcgcggccgacgtattgaacgcaggagttccgtcatgacccgcaccatcatgtgccgcaagtacaaagaagaattgccagccctggaacgccctccgtacccgggcgccaagggccaggacatcttcgaccacgtctccgccaaagcctggggcgactggttgaaacaccagaccctgctgatcaacgaaaaacgcctgaacatgatgaacgccgaagatcgcaaatacctggcgggcgagatggacaagttcttttccggcgaagattacgccaaggccgacggctacgtgccgcctgctcaataattgatcaaaaaccggggtcggcacgtaagcgacggtaataattaaatattttttgaaaacttgcttgacgaccccctgaaaaacccgtttaatgcgccccgttgcccagatagctcagtcggtagagcaggggattgaaaatccccgtgtcggcggttcgattccgtctctgggcaccactaataccgaaaaaccccaagcgaagatgattccttggggttttttattgcctgcgatttagtggccgccaagtggcagccaactttggggttatttattgcgtggcccaatcgtttagctgttactgaatttttgttgcaaggtagttatttgatgaaccgttacttgttctgcgcgctgttgctgctgacggcgctgctcagtggctgcgccacgcaaatggatgtctcgatcaacgcaacaccggatccggactatcactttgatcggcaagctacggtactggtgacaacatccgtgggcggcagcgcacaaagcaccctgaatgcccgctactacctgcgggacatggtcagcgccatgaaggaccagggctttcatgaggtgtacaccgacgccaccctgcccaagcaacacgcgccaatcaaaatgaccgtcctgcttgatgtcgacagccgccaggttacctaccggtacaccgcgaccgaatatggccaggtacccaccagcaccaccacgcagtgcaagaagaacaagaaaaaagacgaccagttgacctgcaccagcaaaccgaacaccacctatggcccggtgggcacctcggagcgaaccggttacaccacgctcacaaccttcaccgccactgcgcgagatgaagcgagcaggcgcgcggtgtacctgctgcgggtgatgtcttacaacgaagattgcgacgcgaccaagatcgaggcctttctggtggaacagggcctgcagaacctgagttttcaggaccgcgtgcatcgcaactacaccgtcacgatgcctgagggctaccagtgcaaatagctgacactggctcagttgagtaaaaacaccatcagcgggttgtcattcagccgcccttcgaaggccggcgcctgctgctccagggatgtccccttgagcagagccgcctctttgcgcggcactatcacccaggaagggcgcggcaaggtggccaatttctcgggctcattgccaccgacaaacagtggctgctcctcatgatccaggttcatcatgtagcgcactgcccaggtatcgcgacccagatcaacaaagaccaaaggcccaggctgcgaagcgcgtaacgcctccacctggctgacaaacttgcgggtatcgaattgcaggtcttttgcgggatcaatcaccaccaccagcagcagccattgcgccgccagagcaatcacactgagtgaaatcaggcgcaagtcgcggcgccaggcaaccagcgccgccacttgtagcaccagcaacaggccgatcagcaacggcagcgacacatcgggccagtaaccgtgcttttgccacgcatgccgacacacaaacagcaccaccacgcacaaggccggtagcgcgacgacaagcccttcatagcagcggcgcacacccaccagccagctttgcgcctgaagcaagccataggcggcgacagccgcaaacatcggcaccatcggcaggatgtaataggcacgcttgaagtgcggcaccgacagcccgagcagaatcatcaacccgcaggccgcgagccgaaccaccagttgcacatcgtcattgattaggcgctcgccccagcgatggcgcagcgcgatcaacgtcgccagcgctaacggcactaccgggaaataacggtacaaactcaacttgaagtaaaagtagaaaggctcgcccgactcatccaggcgcccgacgacctgcatccggaacacgtcatcggcgaaagcatcgccgccgctgaaccgcgccagtttcatcagcacccaccagcacatcccgagcaagaccagccccacaacaccgtggatcaatacctgtttgacccgcgccccggggcggcccagcgcccaatacacacacaccacgccacacacttcgatcaacccgagcggcccgcgaatcgcgaatgccagcacgaacagcggaaacacggccaattgccttgcccgtgagcccaggcgctctccactgtgcaacaggtagaaactgccgacgcacaacagtgcgatcatcaggtccaggcacaccgagcgcgacttatcgagcaattgcgtggtgagcaaggtcagcaacacagtcaacaaagcccagcgccggctggacggcgccagcaggcgatagatcaatgcgatgacacctgctgacgccagcgccgtcggcaacacgttcgccaagtggttcggcgcaccaaacacgcgggcaaacacaaaactgaaaaaggtcgcagtgccggggtaatccgggtacggctggccataggtggtcgggaaaaggctcgcgccgttgcgaaacatttcctgcaggaacagcgcccagcgtccgtcaaacccttggggctgctcgtcccaaatccccaacgtgaacagcagcaaggcaatcaggaaaatgcccagggactccaggcgaaaacggctgcgatgatccatcagtattccttccaggtaaggtgcgccgacacaatggtgccgactcaccccctgaatagcgcctgaacagactgatagatttccaggtttatcgacgagcgcgccataccagagccgggatcagccggatgtagagcagctcgcccaccagctccaccagtgtttgcagaatcaccgccgtcgcggccagcccgcgcacgtcctcgggcaacgccagcgccaggggcagcaccaccagcgagttacgagtagacgcactaaaggtgactgcccgcgccgtcttcgccggtaacgcaaacagccgggccgccagcgcgcccgtcaacggggccagcagcaggaaacccacgtaaaccggaaccaccggcaacagcaaaccgatatcctgcaccaccgatgttagctgagagccgatcaccacaaacaataccagtgccattgccggcaccggcagccacgcccaggccgtgttccaggcattgataacgcttgagcgtcgggccagagatgccgtcagcacggccagcaccatcggcagcacaatcaacaacacgaacgcttcgacaaaaggcccgaccgccaccacgacttcagaatgcgcccccagcatgaaccccaggtacaccggcagcagcaccagttgcagcagtaacagaactggcgtcgcggccagcatcagccgcgagtcacccttgccgatatgagtgaacaccaccacgtaatcgatgcacggcgtgagcaacaccaacaatgcgccaaccaacagcgccgggcgctccacaagcccacgggtcaacacccagaccagcaagggcaccaaaatgaaattggcgagcagcaacgcgcagatgaagcgcttgttgccaaggccctcgcgcagatcgagaaagggaatttgcaggaacatggcgtacatcaacacggcgatggcgggcgtgacccactcgcccagactttgagccgacacgggcgcgagcacgccaaacgccgccgccaggaggacggcggcgaagtaaatcgggatttggttgtgctcgagggtgtcgcgggtcatgggctggctctggctgatcaatggattgcaagcctaagcacccgggaagataaggtcgagcgccgcgacatttcctacgccaagaccacgataaatttgttagtttcggtttccaataaaagcgcgtggccccaataccccaaagcgcgaggatcgagccgccccatgaacctgcccacccgccccgccccagaagcctttcgcgaacccgctgccgacggttatgcgatcggcggcttcacctggcgccacatccgcaccgacccggcgcgtcccgtggtcatcatcaacgccgccacctcggtgcgttgccgccactactcacgctttgcagactatttgttcgcccagggtttcgacgtcatcacctatgactatcgtggcatcggcgagtcgcgcagcggctcgctgaaaggcttcaaggcgtcctggtcggactggggcgtgctggatttcgaggcgatgctgcaacgggcgcaacgcgaatttccggggcagccgattgatgtggttgcgcacagctttggcggctgtgcagccgggctggcagcctcgggcgcagcaatccgcaggatcgtgacggtcggcgcccaattcgcctactggcgcgattacgcggcgagtacccgctggcggatgtttggcaaatggcacgtggtgatgcccctgctgacaatactgtgcggttacttccccggcaagcgtatgggctggctggaagacaccccgaccggtgtagtgaaggactgggcgaccccccaccagcgtacgaaacacggcccagcggcagagccttgggtgagctgccctttagccgggtgaaggcacagctgctggccatcagcattaccgatgaccccttcggaacagtcgcggcgatcgagcggttgctgagttatttccaaggcagtgagcgcacccacctgcgaatcgcccccgaagatattggagaaaaagacgtcgggcatttcgcgttctttcgcagtgaatatcaggaccggctgtggccgattgcgctggagtggctgcaacagggcgcactgccacaagacacaccagggcaccaggtgacggatcgtacctagattcccttgggatttgccccaacctgcgcttcaatactccacctgaatccacaccccaaggacgttgagcccatggcctcgccgaacaagcagcaaaaacgtgcccaccgggccaaggccaaggccaagcaaaaccgtacccagcgcgccgtcgcgaccaagccggacgcgttcgccggcgatgacagccgcattgacctggagtcggtggatttaaccgagttgtttgtcgagatgcgcaccgcaggcgagaccagccagcaggcgttgtgcgcggcattcctggcgcacccgctgttggcgttggtgctggagcaggaaggcgaagaggaagccaccgacttcatccttgcggcactgatcgagtatcgccagtgggccacggacagtgatgatgaagcggccgcgttggcgtggattgaatcgccgcagtttcaggccgactacgttgcggcctcccaggccctcgccaacgcccaggattgataccaaaccaactgtgggagcgggcttgcccgcgatagcggtgtgtcaggcgaattggatatcggctgtcagtccgtcatcgcgggcaagcccgctcccacatggttcagcggtgcttcatcaattgagtacagcagcgcccaccctctgcgccttgcgacggctcgccacaaccagccccgccaccaccaccagcaaactcaaaatcccggtcgcaataatctcgacccggtgggcttcctggaacagcatgatggtcaatgtaccgacgatgaataccatcaccgcataagtcaggcccggaaacagccacatcttgaacacgattttctcgccggctgccgtgcgcttctggcgcatgcgcagttgcgacaccgcgatcaccagatacaccagcagcgcgatagcgccggaacttgccagcaggaattcgaacaccgctgcaggggccacatagttggcgaataccgccaggaacgccgcgccggtagacagcaacaccgcccagtaaggcgtgccgctcttgttggtgcgtttggccacggccggtgcgtcaccgcgacggcccagggagaacaacatgcgcgaggcagtgtacaacgccgagttcaagcagctggtcacggcaaccaacaccaccaggtcaacgatcagcttggcgttgggaatgcccatgcgttccagcacggtctggtaggaacctaccgccgccagggtcggatcgttccatggcacaagcgacaccacgatgaagatcgacagcaggtagaacaaaccaatccgccagatcaccgagttggtggccttggtgatttgctggccagggttcttcgattcggccgccgcgatggtcacgatctcggtgcccatgaaggagaacatggtcgtcaggatcgccgccaataccgcgcccataccgtttggcataaagccctgggtatcgaacaggtgcgacacaccgctgacctggctggtcggcaggaagccgaaaatcgccgccaggccgaggatcacaaagcccacaatcgccacgactttgatcagcgcaaaccaaaactcgaactcaccgtagttcttcacgctgaacaggttggtcgcggtcagcagcaacgtgatgatcagggtaaacgcccagatggccacgtcagggaaccaggcgtggaggatggtcgcagcggcgttggcttccaacggaatcaccagcacccagaaccaccagtacagccagccgatggtgaagccggcccagtgcccgatcgcgcggtcggcataggtggagaacgagccggtgtcgggcgaggccacggccatttcggccagcatgcgcatcaccaacaccaccagcgtgcccgcagcggcataagccagcagtacggcggggcctgcggcagcaatcgcgtggccggagccaacaaacaaaccggcaccaataacgccggcaatcgacagcatggtgacgtgacgcggtttgagcccctgttcgaggtcattggagctttgcgtactactcattgacacacctttgcgaggaattgcgaaaacagtccgcccggcctgcgatctttctcgtgaaaagaaaccaacggggcgttctttattttttacgcaagatttgcgccaaaatgtttcacagccttgtttgacgcggcctgcagcgcattccaaatacgctcgcaagtcattgagaataatggcattccgctatagcgttaccaggcgactcactttcaagacgtataaacgcaccaaaaacacacactaaaagtgcgtgacgctccattaaagggctgataagcgccgtttgcccggttaacccttccaacacccggccaaagctggcaccatcgcgcccttttttacgcgaagcctgtggatttatcgggttcaaacgtctgttggttgttgatagcgcgacacgctgctgcgctgatgcgacaccctgccgcagaccacccgtttaccgcccgccgggctgttggctgtcatccaaacgctatgctagcttggcgcctcgccaggaaggcagcccaacagcaggcacgcaatgaacacaatgaggaccgcacatggccgaggccgcgcccgcgcttgaaatccgcaacttgcataaacgctacggtgagctggaggtacttaaaggtatctcgctgaccgcccgcgacggcgacgtgatctcgatcctgggttcctccggttccggcaagtccacctttttgcgctgcatcaacctgctggaaaacccgcaccagggccagattctggtggccggagaagagctcaagctcaaggccgcaaaaaacggcgagctgatggccgccgacggcaaacagatcaaccgcctgcgcagtgaaatcggttttgtgtttcaaaactttaacctgtggccgcacatgagcatcctcgacaacatcatcgaggcgccccgccgcgtgctcggccagagcaaagccgaggccatcgaagtggccgaagccttgctggccaaggtcggcatcagcgacaagcgtcacgcttacccggcgcaactgtcgggcggccagcaacaacgcgcggccattgcgcgtaccctggcgatgcaacccaaggtcatcctgttcgacgagccaacctcggcccttgacccggaaatggttcaggaagtacttaatgtgatccgcgcactggccgaagaaggccgcaccatgctgctggtcacccatgaaatgggcttcgcccgtcaggtgtccagtgaagtggtgttcctgcaccagggcctggtcgaagagcaaggatcgccacagcaggtgtttgaaaacccgctttcggcgcgctgcaaacaattcatgtccagcaaccgctaacggagcaacatgcatgcagaactataaaaaattccttctggctgcggccgtctcgatggcgttcagcgccacggccatggcagaaaccttgaaaatggggatcgaagcggcctacccgcccttcaacaacaaagacgccagcggcaacgtggtgggttttgacaaagacattggcgatgccctgtgcgccaagatgaaagtcgagaagtgcgaagtgtatgtgtccgactgggacggcatcatcccggccctgaacgccaagaagttcgacttcctggtgtcctcgctgtccatcaccgatgagcgcaagcaggctgtcgacttcaccgacccgtactactccaacaagctgcaattcatcgcacctaaagccacagcggacttcaaaaccgacgccggttacctgaagggcaagatcatcggcgcccaacgcgcgacgctggccggtacttacctggaagacaagctgccggataccaccgccaagctgtacgacacccaggaaaacgcctatctcgacctgacgtccggccgcctggatggcatcctcgccgacaaatacgtgcagtacgaatggctcaagagcaaagacggttcggcctacgagttcaaaggcgacccggtggtggaaagcgacaagatcggtatcgccgtacgcaagggcgacccgctgcgcgagcgcctgaacaaagccctggcagagatcaaggcagacggcacctacaagaagatcaacgacaagtacttcccgttcagcatcgaatgatctgagcgacttgcccggtgcgctccgtcgagcgcgccggctttcagcaatgcctgccgcgatatgaaaacaccatgaatttcgatctctacggattcggcccggcactcgccgccggcgcgctgatgaccgttaaactggcgctcacggccctgtgcctggggctggtgctcggccttgccggcgccttggccaagacgtccccgtacaagccactgcaatggcttggcggcagttactcgaccatcgttcgcggcattcccgagctgttgtgggtgctgctgatttatttcggcacggtcaatttgatgcgcgccctgggggagttctttggtaaccccgacctttctctgagtgcctttgccgccggggtgatcgccctgggcctgtgctttggcgcctatgccacggaagtgtttcgtggagcgattctcgccattcccaagggccaccgcgaagccggtgtggcgttgggcctgtcgaagttgcggattttcacccggttgatcatgccgcagatgtggcgtatcgccctgccgggcctgggtaatctgttcatgattctgatgaaggacaccgcgttggtgtcggtgatcggcctggaagaaatcatgcgccacgcgcagatcggcgtgaccgtgaccaaacagccattcaccttctttatggtcgcagccttcatgtacctgggcctcaccgtgctggcaatgatcagcatgcacttcctggaaaaacgcgccgcccgcggctttgcaaggagcacccaatgagtggtgactacagctggctgtcgcattttgacctgggcctgaattgggccgtgatcatcaagtggctgcccaaattggcccagggcgcgaccctgacgcttgagctggtggccatcgccgtaatcgccggtttgctgctggcgattccgctgggtatcgcccgctcctcacgccgctggtacgtgagtgccctgccctacgcctacatattcttcttccgtggtacgccgctgctggtgcagttgtttctggtgtattacggcctggcgcagttcgacgccgtgcgcgagagcttcatgtggccctacctgcgcgacccgttctggtgcgccacggccaccatgaccctgcacactgcggcctatatcgccgagattctgcgcggcgcgatccaggccattccgcccggtgaaatcgaagcggcgcgcgccttgggcatgtccaggcccaaaacgctgttctacatcatcctgccgcgcgcctcgcgcatcggcctgccggcctacagcaacgaagtgatcctgatgctcaaggccagcgccctggccagtaccgtgaccttgctggaactgaccggcatggcgcgcacgatcattgcgcgcacgtatttgccggtagagatcttcttcgccgccgggctgttctacctgttgatggcctacatcttggtgcgcggcttcaagttgctggaacgctggctgcgcgtcgatgcctgccagggacgttgaagcgcgcttcaatgcgctggatgcattcctgatcgagcatcaagggctgtggaaaccacggccctttacgcatctgcacttgccctgggaaacggcgcacccgcagttggcgcagtggctgcgccagcgttcgctggccgaggcggaggccagccataaccagccccacgcactacaggcgccggcgccttttccacagctcgccgaacaagcgcagcgcttgagtgctgtggataagttaccgttgcaccccctgaagcctgctctccatcgcctgaacgtggaggtgcccggtcgcaaatggcaacagatcgaagccttcggcgccgcgctgcaatttgcgcaaacacccacacattggctggactggtgcgccggcaaaggccacctcggccgccgcttgctgcaacccggccagcaactgacgtgcctggaatacgatccggccttgatcgccgcaggccaggcgctgagcgatcaccatggcttgtccgcccgccatcaactgcaagacgtgatggccgatgtggcgatcaaccccgaacacacacccgttgccctgcatgcctgcggagacctgcacgtacgcctgctgcaactcgccactgcggccggttgcaaaagcctggcgctggcgccgtgctgctacaaccgcatcaacgctgagaactacctggcactgtcggctgctggccgcgcatcgcagttgcggttatcgattgaagacttgggcctgcccctgagcgaaaccgtcaccgccggcaatcgtgtacgccagcagcgcgacacgtccatggcccggcgcctgggctttgaccgcctgcaacgacaactgcgcggctgcgacgactacctgcccacgccgtccctgcccgcgagttggctggataaacccttcgccgactactgccaggcgctggcgagcctgaagggtttatccacaggtgaagagaattgggccgagctggaggcgtacggctggcgccgtttggccgaagtgcgaaacctggaattggtacgaggcttattccgacgcccactggaaatgtggctggtgctggaccgggcacttttcctctcggaacagggctacaaggttgagataggcactttctgtgaatccacgctcaccccgcgcaacctgatggtgttggcggagcgcgattaaggggcaaaatttcctacacgcgccctgtggataactctgttgatggaatctttacagaagctgtagccatctgcgttacgggccaaaaggcctgctggtcattttttgttcataaaataaaatgcacacaaaacaggcagttgcagcgtgttgagaacggctccacaaaatggctgtttcgtgacagccccaaccaaccgattgtgcataagcatctggcgataagcgcataaagcatactttaggcgcgccttttcggcgccttcagcagttggcaaatctcgttgaaatcatcactggccagccgtttcgccacgttgtccaacggatcggaggcaaacgccagcgcctcgttgattttcatgtcgcgatgaacctccagcggcgctttgccaagccgctgcttgaaggcctcgagcatgtccaggctgaaagcattgctctcgtccacctggttgaccaccacatgcacagccggtggccgctccccctcaaggtgtggcgcaagcaatacatcaagatggtccagggtacccagacacgcagcatcagcttgcacaatcaccagcaccacgtccgcgacgttgagcgcttgatgaaagtaaacgttattaccggccggggtatcgatgatcaccgtctgccgctcgctcaaacccagagcagcgaggcgctgtgcgagccaggaaggttcgtgtttaagccagcgttcgaggttttcctgctgctcgatgtcgatatcgccaaaggtaatcacctggcaaccggcgaaaccaagctgctgcaattgcgcccattgcccatgttccaggctggtacgaccgagcccgggcagtgatgcactgacgccgaaatgatggtgcaacgcattttgcgggtccaggtccagcgccaccaccgattcgccatggcgctgcaaaccgctgctcaaggccgtggccaatgtactgcggccgacgccgccattgatcgacaccaacgccaccactttcgggcgcagcgcagcggtctcaggcggtcggggatggctgctttcgtcggcaggcacgctgccgaagaagtgcatgcgcgcatcaatgccgtgggcatcatgggttacgtttttgccgaacaatgccagcagttcttcactaaggctcatagcctgctcctcacgacgcagcttaaagacgtgaagggtcggcaagcaggtactcaccgcaggtctttttataggcgtcccagttgaagcattctgtgacagacacggcaaagtgtcattattttgatgttttaactggttgttttttagacaagtggtaaatggtcaaattaatgaccaagccattccttaatgcaaacgcaccttgagggcacggcataacgcattcacatcctggcagccgatactgttgagcagcgggtcaagcggatcgtttccgtaggcctgcgcctcacggaacgccgggtcccggtggaccgcgcccaacacggcgtcgccaaggtgcagcttgaacacagtggccatgtcctggctgaaagcgtgagcgccgtcgacctggttgatcacatagaagcgctccggggacgacccaccctcaaggtaaggcgcgagcacttcatccatcttggccaaacggcgaaatgaagccgcgtcaggcttgaccaccaccagcaccacgtcggccatcgacatcgcctgattaaggtaaaccgtgttgcccgccggcacgtcgatcaccacggtgtcctggccattcaggcccaaaccgcccaagcgcttgccgagaaaatcgaggtcctggcccagccagcgcgtcaggctttgttgctgcaccaggtcagtatcaccgaacgccaccagacgacacccggcaaacccacgctcgggcaatgcctgccaggtttgattgagcaggctggttgcgccgatgccgggcagctcagcgccggggcacaagtggtggcgcagtgcgttttgcgggtccaggtccaacgccagtgccgggtggccttgacgctgcaaaccactggcaatcgccgcagccaatgtactgcgtcccacaccgccggtggcagacaccaccaccacgactttcggcgccagcgggtccgaatacacctcaccacgcgggccttcgaccaactctgacgggcgcaagtgattagcagcgccttggttcaactgatccagcagatgctgtaaaggcgccggcgccgattccggggttgcatcgggctggctaaaagagtgcatacccagcgcggtatatagttttgaaatgtgatctgtacgccccactgactgcctcctcctctcgcaaaccgctggttaagtaaggcgcgcattgtgtgatatcacactgatggtgtcagtattttgctgtttgtaacgaaatgctttcagatgagcggcatggcgccatttttatggctcaatacgacgttttaaatttctgcttctaaatcaatgaactactgaatttatgtacgatttttgatcagtaatcacccatttacgccaagcccgactcctcttcgtatcaacacgtacataaatccccagccaatacacaacgagacaaaacccgcgcctgcagacacagcccggatacctcccaggcattcaatggcctcaccccaaccattgacccaagaggccaccaccatgaacccgaacaactggaaaaccctcatcgccgccaacctgcttgccgccagcttcaccgcccacgcaggcgtcagccacaagcccgacatccagcgcgtactcgccaccaccgaagacacccgctccggctgcggcgtagtcaacgcccacctgacttacctcgactccaaaggccagacccaagtgctggactacctgaaattcaccgacgactgcggagatggaaactgagccgctggcttgtccgataaagcgcccccggggcgacgaaaaagctgagatcgcaaaaaaacctctgcatctgcaaaaatagtcagaattcaggggtttacagatgcttgccaatcgttataatcgtcgccctaacacgccggtatagctcagttggtagagcaactgacttgtaatcagtaggtcccgggttcgactcctggtgccggcaccatacaaaacaaagccctcgcagaaatgtgagggctttgttgtttccggggttcggagcctacaaaagcgcccaaacctctttctccctattgcgactcccaccttcactgttgcctggctctccccggacgcctgtgcttcctgcttagccctgatgtcccatggcgtggcagcgcctgacttttcaaaacgacagccaactcgatcgacgactcatcgcgacccgccgaagtcgtgaactcccgctgctgccaggccgaagcactttcacgttaaagccgcgctgaacgggatcataaacgtgaaagcagaaaagagcagcgttaccgccacttccgctgcatagatcttaaacaaccatacttataaatttatgttccatatgttctgcagggtttgtcttgtctttttatttctgcatgcactataaggtgacaccgcaactcgaaaacccataaggctcaataccgcacgcgcatcttatcaggcaaaaaacagcatcacgggtgttcacggagataatacctaaggtacagaagcgagcttcagggctgacgcttctctaacccacgttaaagagggatctatgtttgaggaagttggcgacaacattcacgtgttcgaattttctattccgggcctcaggtttgagaaaaatgctgtcacctcgacatatgccggaaatggctggttcagccgtaaacttatgtccagtgaaggcccgctcatctccgacttcgttactcacgaacccaactttacttactccacttatggcatacatgtcggccaggatgatcgcctgacattcatgggggataacggcaagaaaatagagggtctgtttgttgattgccgtgcggaaagtttgtccttgcaccaaattgttaaactcaggttctcgccaagcctgtttcgacatctggttattccacgaggtgtcgcccatacgtttgataacctggaatacattgtcacccgagatgagcctgtatggcattcggatcaaggcaatgctgcatggaatctggataatgatcttgtgtcagttcctcgcactacgaaactcgatcaattccccactgtaacggccaaccggtatcgtttgcctgacgaagcccatcgttttctttcgaaaatttcccagtctttactgcagaaccccaagtcctatctggctcgatatccggtcactatctcgggggccgagcaatatgtaatgtttgaaccccaagcgtggtctgacgatgcccgcagcgtcgccgaaaagctgactgacggggacatatgcggcgcccggataaggcgcaatcgctacgccttgacgggcgccaggtcttacacactggtgcccaataccgcctcatgcgtgtctgacgttcttgtgctccctgcctctgtcgcgggtaaacctcttcagtattactggcatgcaagaaccagaaaaatatacaccttcctcaataatcagcagtccaggatcgacttggacctgattgatctcaggcctggctccgtgacatacgggcaacataaatccctcccgatcacctgtgatccacgcaccagcgttcatatagagcaaggcattgcctacaccttccgttgcagcaagttaacgctggtccgctgtgagcatgaagttttcgtcagtcaggatgagccacgctcggatattcctatgttcgggcaggatttgattcctctggcaactgaccagccttatccaaacatccggctaccggacatgcgctgcccggatatcttgttgtacaaaatggctaaatacgagcagcagccgatatagatcactcagttttggggtgtgcaccctgattgcaacttactgacaccatggagattcatatgaacgcaactcaagaagccgtatcctggaaagaagaactggccaagctggtcagttcggctcaaaccacagaagagtcgctggcgcttaccgcgttcgaaaacgcgctctctccctatctgcaagaatctggagcattacgtacgctgcttggcaaaatacaagcgatggaaattgttgcactggatagccttgcgtccaagaaggacttcagcagcatcgatgaacttcaatcattcttgcctgccaacattaaagtcttggctgcctgacatccgtatcataagagtttaaaggactaaattgctgtgcacacccctttctattcaacgacacgatcaatgtggtcctttgtggctttgggggtattactgatactttccgaagccatttatgacttggtattcgccaatctcgcttattccatcagcggcacgacgctggctgttacgactacttatgcaattggttatagtgctgaaatactggtgaccctagtcggtgcaggatttatcgaccggttcaacaaatggcggttgttcattgccacgcaactgttaaacattgtggtgtttgcgttggccattgccgtcctcaggggtgacgacaggtccgtggaatgggtatggttttttgcattcttcgtcgacctgatacatcagtattcgcggctgattatgtttgccttgattcctttccttttcaccgctgacgacattcctcgggtcaacggcttgctcgcaaccttcaacggcgttgccagaaccctggggccagtcatcggagcgctggtcatattcaatgtcgggttgtcgatatcacttctcgcctccattgccttcatgctgggggcgctcgccctgacaatcagcctgagcgcgctgaatggcaagcccacacacctcgacatcacgggctcctcattggctcaacgtttccatgaaagtgtcaccggcgcctcgagagccaccatcgatctgttacgtgctccacgctggcggtatttcctcgcctcgtatgccacctgcctgttggtagtcagcgtgctgtcgctgctctgggtccctctgcttcgaggctttcatggattctccgaagcgcagacaggctatctgttctctgtcggggcggcaggcgccattgccggcgggctcgccttgcgcaccagcggccaggctgcccgggtgccaggcaccgttctgctatctcacttgatcatgatctcaggcatctgcatcagtttgggtttacgtagcaatctctggctgacgggcatcggcatgttcgtcttccagttcggcaccacgctgtattttcgtacaacagccagtgccatccagctcaccgtgcccaaggaaatcattggcagttggtacggctcgatagacttcatcagccgttttgccgggctcgtcggtattctgttggccggttgggcctacgacagaatcgggacatacgctatctactcgatacttttactgttgctggcactgagctgtttcaattggcgggcaagccgccaggctcgctggctggttgaaatctgaggtgggggtcggggatccggtttgatgcgggcccggccatagtgtttacttcgccatcaaccgagccatcatctgctagcctgctttgagcattggctgagacgccgcccatgaccaataccgctcctgccatcaagctcagtacgcttcggcaaatagccccctatttgagtatgcgcggggtggcgccgctggagttttttcggcgttttggtatttcaccccaggtgtttcaaaaccccgaggcgtgggtgccgcgcgcggcgtgttttcatatcgccaatgagatggcggcagcggcgcaggaccccttcggcggcgcggtggtggggcacttgacggaggtgcgttccaccggcgtgtggggcgatttgattttgggctccaccaacctcgctcaagcgtgcgcgtcggcagcggtgcataccgatttgctgcaccagggcagcgaagtgaacattctcaccgaaggccgtacgacaaggctgatccagcagttcaccggccaccacggagcagatccgaagcaggtgattttcggcacgttggcggtgcttcgcaaagtgccgctgctgtctggcgcacccggtgccatccgcgtgcatctgaaaaatgcgagagagaaaggcgacgaggcccttgaagaattcctcggcccgaacctcgaaatgaatgccgagtacaacatgatcgaatttgatcgtgagttgctcgaaatccctctgcagccggttcgggacgttgcctggaaaaccacccaagccttgaagtcgacgtctgacgcagcggatgtgctcgcgcggcagatttcggatcaggagcagtccaggctgctcactatctcccggacgctcgggctgtctgtgcgcaccttgcaaaggcgcctggagcactgcggtctggacttcgatgccttgcgtgacgagacccgccgcaacgaagcctttcagttactggccagcggaaaatacagcgcgactgaaatcgcctacatggtcggctacagcgacccggcgcacttcacgcgagccttcaagcgctggaccggcagcccgccgtcgcgttaccgcgccaccctctaaccgcctcgcctgacgcttgggcacctttgcggtgcggctttcgcgtgcccgcccgtcacgcttttggcaccaaatggcaagtttccaaaaacaccttcttatacagttttgcgaggaaatacccccttacaaaccacgaggtttcaatgtctctttcatccacggcctgcgttctcaccatggcgctgactgcttttggaagtgcatacgctcaatcgtcccagacgtcgacagtcgcggttggcgtggataattttgcacgtgccgagtccgacctctacatgggcaagatagtcgcgcagggcggtttgggccgctttgttcatagccgtgaaccggtgcccatcgacgcacagaatgtgatccggatgaaccgcgacaccctgtactcctcggcagtgttcgacctggacgccggcccggtcgtcctcacgttgccggaggctggcgggcgcttcatgtcggcgcaggtggtcaatgaagatcactacgtgcccgccgtcttttacggcgccggccgccgcacgttatcgaaagaggctgtcggcacccgttatgtctttgtggcggtgcgcacgttcttcgaccccgcagaccccaaggaccttgaaaaggtgcatgccctgcaggacgccatccaggtcagccaggccaagccaggcgacttcatcgtgccgaagtgggacgcggcgagccaggcaaaggttcgtgatgctctcgccgtgctgggtgcgacgcttcctgactacaaccagtcgtttggccccaagggcaaggtcaacccgatccatcacctgatcggcaccgcgaccggctggggtggcaacccggccaaggacgccatctacctcggcggcgtgatgcccgagaacgacggaaaaaccctctaccggctcaagatcggggacgttccggtcaacggcttctggtctgtcagcgtttacaacgccgacggttacttccagaaaaacccctacgacgcctactcgttgaacaacctcacggccaaaaaaagccaagacggttcgattgttatccagtttggcggttgcgacgcgaaggtcgccaattgcctgccaaccccacccggatggaactacacggtccggctttaccagccaagcgacccgattctgaatggccaatggcgctttccaaaaccgcagcccgttgcacgctaaccggcgcatgcgcccctctgaacgactgagttttgcacccaaggacagtaaccatgccaaccatcggtgattcacctttttttaaacgccccatgatgctcatgaccggcgccaccctcgccctggcgacggcgttgcctgcattggcggacgattcgccttctgtgaccgtcggcggcggcgttgccgtcggccctttgtacgagggttcttcacattacgccgccttcccgtcgctgaaactcaaggcgcaaatgcccaccgagcaatggggcacattcaccgccgcgttcccggatgggctgcgctgggacctgcccggcctggcgccgttcggagtggcgctgttgatcggttacgaccagggccgcaaggaaaaaatccacaccctgggcggtcgcgatgacgacttgaggggcatgggcaacctggacagcacggcgctggtcggggcggaagcgtattggattctgccggccggtcgcctgttcgttcgcggcctgcaatccactcaaaatcgcaattacggcggcgagagcctgggacgtacggcctacctggaagccggggtcgccaccgcgtacgcactgtcttcgacattgactttggattcgacgctgtacggtacctggagcaatgaaaacgacatgatggcgcgtttcggcgttaccgccgagcaggcggcgcgcacccgcttcgacgaataccacccaggcggcggcatgcgtgacgtgaccttgaaactgggtctgacctggcaatggcagccacagctggcactggaaggcggcatcaagagctacgcactggtttccgacgcgcgcaacagcccgctgacgggcgagaaggtcggggcaggcgcctatctgaatgccctgtaccggttttgatcagccgtattcaataagagaacacgcgatgaataacctgcataagcacgtggcgctggccggcctgctctggtcagggttggcactggctgacgaggccgccacccaagtcaccgaccctcatttcaaactggctcccggctacctcgattcggcggatttacccttgcgtctggcattgctcggcgctccacccaagcctgactctgcggcgtttgcgcgggatgaggaagcacggcgcacggcactgtcgctgcgtggcacggcccgggaaaagctcgcggcagcggatgcggagctggcattcccaggccccgcgcaagccttttcctgtgcgatgggcacaccgatcaccgagaaaaataccccgcatctctacaccttgatgcagcgcacgctgacggatgcgggcggttccacctatgccgggaaaaatgcttacaaccgcacccgcccgttcgtggcgcataacgaaggcacctgccgcaaagatatggaaccgttgttgcgcacggatggctcctggccgtccgggcactcggctgccggttgggcctggggcctgttactggctgaaatccagccggcgcgcgccaccgaactgatgacccgcgggttggcgttcggccagagccgggtcatctgcgacgcgcactggcagagcgacgttgacgccggccgcatcatgggcgccgcaacggtggcgagcctgcacaacaaccctgcgttcctggcggacctggcggcggcgaaagaggaggtcaaggctgctcaaaaagccgggctaaagccaacacaggactgtgcagccgaaagcgttgcgctctcgctgacccagcactgatcggagaaacaccatgatgcaccgtcacaacgcccgcctggccctgctgttgggtacgtttgccgccagcggagccggcctgccgatgccggccatggcggcagacaacgatggctggacgttcaacggcggaccttacgtatggggcgccggtatccgtgggcacgtgggccacagcagcaccggcacgcagtttatcaagtccgatttctccgacatcgcgcgcacggtggatatgtcggtgatgttgatgggcgaggcacgccgcggcccttacagcgtgctcgctgatctgatgtacatcgacaccgatacccgcaaccgccttccggctggcgctcgggcttccaagctggagttggaaagcaaaaccgcctccggtttcctgggcggcgggtacaccgtgttgggcgatgaaaaacgccggctggatgtcgccggcggcgtgcgagtctggtacagcagcaccaccctcaccttgcatggagggtctgtcagcggcgaatccgggtcagacaaggccacctgggcagacgccatggcagggctgcgcgggcactatgcactgaatgagcggttctggttgtcctcctggggcatggccggcgccgggcaatcccgggaggactgggacctggcggcgctggcgggctgggagttttaccccggcttttcagcggtggccggttaccgcgccatgggtgtgaactatcgcaatgatggttttgtttacgacatcgttcaaaaaggccctctgctgggtatcagtggccgattctgactctcaggcgtatgcaccgttttttctgcgcaggtaaaccatctgcgcagtcagcccaatgaccagcgctaccgcgatgctgccctgtgcacctagcaacacgggcgactgcaggtcagtgacaaaggggtggccgtcgggcacgcggcgcagggtctcggacacggtgggcaccatcagaaagaacgcggtcaggctcaggaaaatggtttccagataagcccgcgctcgccccagccaagtcatgtgccccacgccatatccagcgagcagcagagcaagggtgataacgccaatgatattgctgaccggctgcttcgccaccagaaacacgctgagtgcaccgatcagcatcgacgcaaggtagaacctgcccggcgttgagcggggaacaatgcgaccgtgccggataaacatataagccgccaggggaatcgcaggcaggctgccgagggtgtgtacccagccaagggcggagattccgaacatgtgaggtgctccaggtgattggatggtgcgcataaacgatcaccgccccaacgggttcgtgatactggcgccagcgcgttatgatccgggcctcagcttagtgagtgcgtgggcaagccgacatgatgaatccccttgaaaacttgatcattcatccggaaatgaaactggaagggctggccaagggtgatctgctgtcccaggtgctggcacagatccgcctgaccggcgaccgtgtttactctgccgcactggagagtgcgcaatgcctcgacctcgaccagcagagcgcgcacatctgcgtggttcagcaaggtcaactacgcctggaaggtgccgggcagccagccgtgacgctggcgcaaggcgatatcatcctgctgcctcacgaccccaccggcatcagcatcaccgcctgcgatgggcctgcgtcggtggtgatctgccgcttctggttcgacgggaacagtttccaggccatgctgtttgccttgccttggctgatccacattcgcgaagccgatgcggcggattgggcgcaaggcatcctgcatttcatgctgctcgaagcaaacgactcgcagccaggcggggcgttgatgatctcgcggctgatcgaccttacggtgattcgtatcctgcgcacctgggtgcacctgaacgcggcgtccgggtggctgggcgggttgtcggacgcgcgtatcgcgcgggcattgaaggctatccatgaaacacccgggcaacagtggaacatagctgcgctggcggaaatttccggcatgtcacggtccaatttttgcgaccgtttcagcgtgctggtggggcgttcgccgctgcgttaccagaatgaatggcggttgaggttggccaaaacgatgttggccagacacgacagccgcattggagaaatcggctttgcgattggctatgaatccgaggcggcgttcagtcgcgcctataaagcgtttttcggccgctcaccccgcgaggacaacgccccgagccgttaaggccggggcgcgctccgatcaatgcccggcgctttgcccgccgtctacatggagaatctcgccggtgacgaagccggcgttttccaggtagatgatcgcctgggcgatatcgctcacctcccccatgtgcccgaccgggtgcagctgcccgagcgccgcgtgggtttcttcgccgtgcatcggcgtcttgatgatccccgggctcaccgcgttcacgcgaataccgcgcttggcgtactcgattgccagggatttggtcgccgaattgagcccacctttggtgaggttggcgagcaccgagggcacgccgtcaatggcgtggtcggccaggctggtggtgacgttgacgatgtggccggtgcggttcttttccatctcggcgagggcgagttgggtgatgtagaaaaagccgttgaggttcaccgccagcacgctcgcgtaatcctcctgggtgtaggcggtaaagggtttggcgatgaaaatgccggcgttgttgatcaggctgtcgatgcgcccgaaggtggccaatgcttcgcgaatcacccgttgagcggtggccgggtcggcgatgtcacccgccacggtgtgaatgttcgggtcgtctgacggctggatcgaacgcgaagtggcaaccacgcgatagtccagcgcgcggtaggcctggaccacggcggcaccgatgccttgggacgcgccagtgatgatgacgactttgctcatgatgcttctccggtaggggcttgggatttgcggtattcggtggtggtgatgccggcatagccccagttatcggtgtcgatttcttcgatgacgatgtgggtcaggtccgggcgtttgttgagcacgcgttcgagggtttcggtgaactcggcaatgacctgggctttttgctccggggtcactccatcacgggtgatgcgcaggctgacgaagggcatgacggggctccagtgacccgccatcggaagtgatgggcaggcaatggagtcaatctaagggctaggctggacgggataaaggtagggtgcagtacttcattagtgatgcggtgtaatgaataaaccgggacggtgttttttcacaccgcccctgtcgaccgtgaaccagaccagcacgacacaaaacgcgaggggcaacgggtcaagccactacttgctcgatggacgcaaaatcataagtcgatacaacaatctcgtcggccattttaaccgtcaaccgattgaactcccgcaccgcgtgcgcaggcaggcttaccacgttgaccttaggtgtattgagcgtctgcgtgttggttttcaagacgcggggaacaaacaagactgcaagcctggccgatagagggaaatagcccacgaccgtctctagtcgaccaatgtcgtatcccagcagtggtgcgtatttattctgtgccagatcaaggtcgaaacatggcctgtcgctagtgacaaagctgctctgagtggccactaacaacacaatattcaacttcttaaagcgatccctcaatgaagatgaaatcgcttgggacgccaagtcgaaagcacttagatcaaccgccatcgtagcgccccccggcacttgagggtgatccagctcggctctcttgcgcttcaacgctgcaggagtcctgaaatatgagatgcaggcaaagttttttatgctgtcgacatacttaggcagtgcgcataacaggctggctaaggtatggcatacgtattgatcttcagatatttgggatgaggtctcctcgcggtagatcgtgggagcattatctgcactaaaggtgatgaacctcatgacatcgcgccacgaaccctcgtgctcgccaaacatattttcgatgaggttatcgggctggctggcgtcttcttcgtagaaccatttctcgtgcaaaatcgattttgaattacgcggtgcggagttctgttgttgcagaaaatgcgccatgacttggcgaccagcctcagcgtcatgggcccaccctgtagcggtccatccacgcaggtaaacccgtgggacgtaatgctggttcttcgtaagattttttttcactgtggaacatccctgtgagccaaattaaacggttaaccctacaaacatccagctcatctttcacttaaaaaaacgccccggagccaacggccacggggctttttttccaacctggaatcaggtcgaagcgcgacgccggatcaatcagaaaacgttgatcgggtagtcggcgaacaggcggatttcgttaccgcctacgttgtagttgctggcgttgttggaaacgcgcaaccaggacgcacgagcacgcaggctcaggtctttggctgggccgctctgtaccacgtacttgaactggttccagatttcacgctcggtgccatcgccacggccgctgccgtcgtcgatgttggtgccacgcacgtaagcaacgttgtaggtcaggcccggtacgccgaaggtggcgaagtcgatgccataacccgcttgccaggaacgctcgtccttgccgttgaagtcggaccagtaggagttggccagcaagatggtattgccgccgtcgccgatgccgccagcgttgcggtagccgccgtacaggtagccggtgtcgccggtgctgcgctggtgagcgagggtgaagctgtgcgggccaacagcccaggtagcgcccaggctccagattttgttgtcacgggcgtcggcatcaccttggttttccagggcgaagctcttgtccagcttggttttgtagccgttgaagtcaaaggtcagcgactgcttctctggcagggccagtacgtagttgacgttgacgtattgcttcttcagcacgtcttgcatgttggaggcatacagcgccgccgacaggctttcggtgaatttgtagctaccgccgatgtagtcgatgcttttcagacggccgctgtcgctaccttcggcgctcttgcgagcttctttggtgaagtgaccagcgtccagctgcaggccggcgatttctttggaaacgatcgaagtaccctcgaaggtttccgagagcaggcgggagttgtcgtactccaggaccggaacggctggcatctgctgaccgtatttgatcacggtgttggagatgcgcgccttgacggctgcgccgcctttggccaggtcattggcggcttcgccgctatcgccttgcttgaagaagtcgataccgcctgcgccgctgcggcctttaccaccgtccagacggatagcgtattggccgatcacgtcaacacccacaccgacggtgccttgggtgaagccggattcgaacttgccgatgaagccctggccccattcggctttgtcttgcttgccgtttttgtagtcgcggctgatgtaagcgttgcgtgcggcgatgttcaggtggctgtcgtcaacgaaacccttggattgctcttggtcgttggccatgactgtcgatgcgctcaaaatccccagagcgatcagactcatccgttgtttcaacatttttttatattccttattactggttgagtacgcgctgtgacaccaagctccgtgtcgcttttttggtgtcgactttttccagaaaaaagaaggcccgcggacgactgaactgccgcaggcctttttttattggatgagtcatggcggttagccacaggcgttgggcgcaatcctatgcgcgggttgaactatgtgtcaatttcgtgaatcgtctgtatttaggcgaaaaaagtctaagcgatttgttccagagccttcccgcaagcctgaaaaaccgtccgattcgtcaacaaaacacattaggtaacacttctggcatcagggatgtttggtaatagataacgtgcgcaaatgcaaagcattaccattcgcgcgcaaatttattcccaccctttccggatacactccccatgcctgcccctcgcctgacacccatcacttttgggttttctgttctgctgtctgccggttttgcctgcgcggccacggtcctacccgaaacctcggtgagcgcggaagccgatgaagatgacccacgcgtcagggaaacaaacactgctacgcgcaccgcgacctcggtacgttacgtaccccaggctatcgactcggtaaaaaccgaaagcctgcgcgcttacggcaccaacgacctgggcaaggcattgagcggcattcccaacgtcagcagcggcgccgacacgcgcttcgacagcttgcgcattcgtggtttcgacgcgagtaacgacttctacctcgacggcatccgcgacgacagccaatacgtgcgcgacctgcacaacatcgaacgcatcgaagtactcaaaggcccggccgccgtgctttacggccgaggcggccaaggcggcatcgtcaaccgcgtgagcaaactgccgcaagccgggcttgaatccagcatcgaagcccaaggcggcagtgaggatttgcgcagcctgtacgccgacctcaacaccgatccgtcagacaacatcagcctgcgcctgaacctgggcaaccaggacaacaacagctttcgcgatggcgtcagtggcaaccgcaagctgttcgcgcccgccatgagctggcagctcacccccgacctcaactggctggtgcaatacgaatacagccgctacaaccgcacgccggatcgcggcatcccgggtgtcaacgggcgaccggcagacgtgagccgcggcactacctacttcgacaaccgcgactacatcgacgataaatcccaatccctgcgctccaagctggcctatgagctcaacgccaactggcaactgcgccacaccctcggcgtgttcaaactcgacagtgatttcgacaacacctaccagaccggcgtcgacccgaaaaccaataaagtcacccgccaacgctggcagcaggacctgaccacccgtaacgtgttcaacaaccttgagctggaaggcggcttcgacaccttcggcctcgagcatcgcctgctcaccggctttgagctgggcagccagcgccgcgatccaaagctgtacaccgccaccgccgtcaaccgtggcggccaggccgtgccgagcctggacctcaacaaccccaatcgccatttgagccacaccgggcggatgagtgcctcgagcaacaaccacaccgaagtcgagagccgcgccctgtatgtgcaggaccaactgcgcttgagcgatcaatggcaactgctggccggcctgcgttatgaccactttgaagtggacaccaccaacaagctgctcaatacccggcaagacgtcgaaagccgcagcgccagcccgcgcgtgggcctggtgtggacgccactggagcatcactcgttttacgcatcgtggagcaaaaccttctcgccggcaggcggcggcttgatcggcatcaccccgaacgccgcaggcagcgtcaacgatctgagccccgaactgacccgacaaaaggaaatcggcgtaaaaagcgactggctcgacgaccgtctcagcaccaccctcgccgtgtacgaactggaactgtataaccgccgcaccagcgacccgctggaccgcaccatcaccctgctcaccggcatgcaacgctcacgcggcgtcgagttgaccgccaccggcaaaatcgtcggaaactggtatgtgcgcggcggcatcggcctgcaggacgccaaggtcgagaaagacaataacggctttgaaggcaagcgcgtcagcgatgtggccaaacgcaatggcagcgtgttcatcacctggaaaccggagatgggctggtatgcggaaaccggtttgacgctggtgggcgaccgctatgccgacaacctcaacaccgtgatgctgccgggttatggccgctgggatgcgctggccgggttccgccaaaaggaatgggatgtacgggcggcgttgaacaatatcgctgacaagcactactacgaatcggcgaccagcgcagcgcagatccagccgggcgagccgcgcagcctggtcgttacaggcacctacagcttctaggttctgcaccgtcaatgtgggagctggcttgcctgcgatagcggggtgtcagctggaaatatttagctgacactccgctatcgcaggcaagcctgctcccacattttcagattccggtgttcttcagttgtgcatcagctcacacaacgcttttacttcatcctcactgaacaaccccgccgggtagcgttcactcatcacactgcgcaggtcggtttgcctgacctgtcgcgagccgtttgctttcaaccagagcgccagcgcatggatcgcatcaccgttgacccgcgtcgggtgaaacggtcgcgtgtagatcaggttgatatcggcattcatttcagcgctctctcctactgcgtgagcggctaacttactcaaggtttgtgacagaactgcgcagtcatgaccttgggttactgtggcaacagcgatacaagagctatgccaatgtcccgtgtttataggcattcggacacaaaaaagcccgcgaccttgctgggccgcgggctggctgtgagcgccataaacgggtggccttaagccactaccgagaacgctgttacaactgcactcagtttttgtgcggagctggctgctgttgagtcaagcaatggatattgcccccgcccagtaacagttcgcgccccggcaccatcaccacttcgtgctgcgggaacagactctgcaggatttccttggcccggctgtccagcgggtcgtcgaaactcggcgcgatgatgccgccattgacgatcaggaagttgacgtaggagccagccaaccgcacggtcgggttacgttcctgcgaaccgtcaaccgggtcgacaccggcacattcctcttcagtggcatacaacgggcctggaatcggcattttatgcactgtgaacgggcgacctttcgcatcggtgctgctttgcagcacgtccatggccgcgtggcagcgcgcgtagttcgggtcttgcgggtcatcggtccaggccagcaacacttcgcccgggcgcacgtagcagcagaagttatccacatggccgtcggtttcgtcgttgtacaggccgtccggcagccagataaccttatccaccgccaggttgtcgccgaggatggcttcgatggctgcgcgatccaggtgcgggttgcggttgcggttcagcaagcattcttcggtggtgatcaccgtaccttcgccgtcaacgtggattgaaccgccctcgagcacaaagcctgcggttcgatagcgcggcgcgcgttcgatctcgaggatcttgccgcccacctgcgcgtcgcggttccacggcgcgtaaaggccgccgtcaaagccgccccaggcgttgaagtcccagttcacgccgcgcacttcaccgttgttgttgatcacgaacgtcgggccggtgtcgcgcacccaggcgtcgtcgttggacatttccaccacgcggatattgggcacatccaaacgcgcacgggcgttttcatactggccggcggaaaccgcgaccgtcaccggctcaaagcgcgcaatcgcctttgccactgccacgtgtgcagcctgcgcaggcttgccgcccaagcgccagttgtccgggcgctcgggccagatcatccaggtttgagtctgtggcgcccattcggcgggcatgtaaaagccatcggcgcgaggtgtgctgtgcagggtggtcatggcaggcggagctccgaatgggggtgaaaaccgactttataacggataaaaatcggctttaaaagcgataaaagatcataaacaatgaatgtgacaacagttagccgataacaatcgactaactagagttgctcgtccaacaccttcgacagcatgtcgacaaagaagtccacgctgcgtttggaggtgaccatcggcggcttgatcttgaggatgttgaggtaatcgccggtcggttgcatgaaaacacccagctcgcgcaggcgatcacacagcagcatggtttcctcagtggcgggttccagggtgtgccggtcgcgaaccagctccagccccaaatagaagccagagccgtgaacggcgcctaccaacgggtgacggtcgatcagcgcttccaatcgcgccttgaaatgcccgcccaccacctgggcgttttcccacagcttttcttcctccatcacatccagcaccgccatgccgatcctgcaactgaccgggctgccgccggacgacgagaaaaagtaaccctcggcctccagcgcttcggcgatttcgcgacgggtgatcaccgcgcccagtggctggccgttacccatgcccttggccatggtgatgatgtcgggcaccacgccctgctcttcaaagccccagaagaaacgccccatacggccataaccgacctggacttcatcggcaatgcacacgccaccctgggcgcgcaccaacccgtacacctgttgcaagtagccgggtggcagtgaaatccccccggcattgccgtacaccggctcgcagatgaaaccggccagctggcgcttgctcgcggcgactttcgccaggttatgttccacgcttcgtacgtaatccggggcactgtcctgcccacggaactcaccgcgataggtattgggtgccgtgaccgggtggacccagtcggggcggctgctcagcgcctgcgggttgtcggcaatcgaagtggataccgcatccgccgccaccgaccaaccgtggtaggcctcgagcacgctgagcatgtcgcgcccgccgctgtaggcccacgccaggcgaatcgccaggtcattggcctcggtgccgctgttgaccagaaacacgcggtccatgccttggggcgccaacgccagcaaccgctcggaaaactcagcgattgccgcgtaatgaaagcgcgagttggtgttaagcaacgaccactgccgcgccgccactgccgccatgcgcgggtggccgtgacccagcactgccacgttgttgagcatgtcgaggtaggaacgaccctgcatatcgatcaggtggttgcgccagccgcgctcaatgcgtggcgggtcgacgtaatagtgtttctgtgaacgggcgaaactggcatcacgccgagccaaaagcgcctcggggtccagttcgggctcggcatcacaggccaaccccagtaattgcgcgggcgacgggcacagcgcctgccaggctggcgccctggacggtgtgcaaaacaacggcggctcaaggtcggcgcggcataactgtacagtcagcggtgcgtggacttcaccgagaacttgccctttcaccagcgccgagtcaggtgtcaacagggttgtcgccccccataaaagcacgctcaactcgctgccctgcaggcacagttggccatcggcgccgtggcgcaatgtcccggcaaacggtgcttccaacaccgtgccatggggcagatgcaatgccacatgaagggggaacgtctgcggctcggcggcgctgtccgggacagtgcgtgacaaccggtattgcccataccgactggccgccagcccatgcaccgccgccgcttcatccagcaagcgccggtcgataccaggttgctcccaattgccggcgtcgaaatgcgggctcagcacacccagatcgatcagcgcaaactcacgccccaccaggcccggcagcaggggcgcgaaatcctggctggccagcggcggcagcgtttcccccacgcaccgcaaaatagcagcctccatcaactcgaacggcaccgaagccgccacatggaagatttcccactcgtgctcggcgtttttcaacaaataagtgttgtccgggtccaggcgttgctgctgctcgctgctcagtaccaacaccgcagcacgggcggcgatcaacggccacagtgcctgcagctcttcgcggcgcagtggcgtcaccgcgtgacaggcctggatcgccggcaggatggcaaacgggtcgccgtcggcatgatgcaacagggcggcgcaggtcaccgacaggtcagcgatgcgccaggtgtgcaccaggtcgccgaaatcgatcacgccctgtagttgccagtgccgcttggcatcgcgctgccagaccacgttgtcgtcggtgatgtccatgtgcactgcctgccgcggcaggtactgtgccaacggctgcaggcgcgccccgacctgctcggcgactcgctccagcgcggtgcgatggggcaggttttccagggcgcccagcaagtgcttgatcaaggcttgggcgtggcgcgggtcccattgcaaggtgcggtccaggccagggtgctggaagtgagcgagtgcgtggctcatctgcccgcacagcttgccgaaacctgcaatcacgtcgcggcccagatgcggcaaatgggtcaggggctggccctcgatatagtccagcagccgcaggtgcacggtttgcccctcgacaaccacgctcagcagctcttcacccgtatgggcgcgaatgacctttggcacccgcaccttatcgctcagctcatgcagcgcggcatgctgggcctgcaattcaacggcggcgtagtcaccccggcaaatcttcagaacaaaccgcccacgctcgctgtcgactctgtagttaaggtcttgttggctgcccagcgactgcagagtgccagtaacgccataatgctgttccagcaattgggctgcctgagtcgggctcacttgggggcacggcaaactggcacgatggatcagcgtggcaagcaacattgtgacgacctcggttttttcaggcgtctatatcgccattgttcgggcccgttaatcaacccctcatgctcaccgcgcttgcaccggctcggttcacaactcaagctatgcttctttcgcccagtgtccgtctaaggaaaaggctttcgacatgcgcattctcatcaccggcggtgccggattcatcggctccgccctgatccgccacctgatccaaaacaccgagcacgaagtgctcaacctggacaaactcacttacgccggcaacctggagtcgctgaccagcatcgcgtccaatagccgctatgagttcgtccaggccgatatcatcgaccaggcgaccgtcagcgcggtactggcacgctttgagcctcaggccatcatgcacctggctgccgaatcccatgtcgaccgttcgattgacggcccgtcggattttatccagaccaacatcgtcggcacctacagcctgctggaggccacccgcgcttactggcaaacgctggcagagccggccaaaagtgcgtttcgctttcaccacatctccacggatgaggtctatggcgacctgcacggcgtggacgacctgttcaccgaaaccacgccttatgcgcccagctcgccctactccgccagcaaggcggcttccgaccacctggtccgcgcctggcagcgcacctatggcctgccggtgctgctgaccaactgctcgaacaactacgggccgttccacttcccggagaagttgattcctctggtgattctcaatgccctcgcgggcaagccgctgccggtctacggcgatggcctgcaggtacgcgactggctgttcgtcgaagatcacgcgcgtgccctgctcaaggtcgtgaccgaaggcgttgtcggcgagacctacaacatcggcggccacaacgaacagaagaatatcgacgtggtgcgcggtatttgcggcctgctggaagaactggcaccacagcgcccggccggtgtggaaaaattcactgacctgatcactttcgtcaaggaccgcccgggccacgatcaacgctacgcgatcgacgccagcaaaatcgaacgcgaactgggttgggtcccgcaagaaactttcgaaaccggcctgcgcaaaaccgtgcagtggtacctcgataaccttgaatggtgccgcagggtccaggatggcagttatcagggtgaacgactcggcaacactgacagtaaggatctgattgcatgatgaagggaatcgtattggccggtggctccggcacccgtttgcaccccattaccctgggcgtgtccaagcaactgttgccggtgtatgacaagccgatgatctattacccgatctcggtgctgatgctggcgggaatcaaagacatcctggtgatctccacgcctgtggacttgccgcagtaccgcaacctgctcggcgatggcagccagtttggcgtgcgtttcagctatgccgaacagccgtccccggatggcttggcccaagcgttcatcatcggtgaagagttcatcggggatgacccggtatgcctgatcctgggcgacaacatcttccacggccagcatttcggcgaccaactgcgcagcgccgcccagcgtccctccggcgccacggtattcggctactgggtcaaggacccggagcgtttcggcgtgatcgacttcgacaaagaaggccgtgccctgtcgatcgaagaaaaaccggtgaagccgaagtcgagctatgccgtgaccggcctgtatttctacgacaacgacgtaatcaagatcgccaaggcggtccagccttcgccacggggcgagcttgagatcaccgacgtcaacaacgcctacctcaagcgcggcgacctgcacgttgaacgcttcggccgtggctttgcctggctcgacaccggcactcacgacagcctgctggaagcctcgacgtacgtgcagaccatcgagcaccgccagggcctgaaggtggcgtgcctggaagagatcgcctacgagaacggctggatcgaccgcgactatttgctggaacgtgccaaatacttcggcaaaaccggctatggtcaatacctgtacacactcgcaggggaagctcaatgaatgtaacggccactgaactgtccggtgtattgatcatcgagcccaaggtttttggcgacgaacgtggctttttttatgagagtttcaacgcccgggcgtttgcccaggcgaccggtatgcaattgcagtttgtgcaggacaaccactcgcgctcgcaaaaaggcgtgttgcgcggcctgcactaccagatcgaacacgcacagggaaagctggtgcgtgtgacggccggtgaagtattggatgtggcggtggatatccgccgcagctcccctaatttcggcagatgggccagcgtgcgcctgtctgccgaaaacaaccgccagttgtggattccgccagggttcgcccacgggtttgtggtactcagcgactacgctgagttcctctacaaaaccacggactattacacgcctgcctccgagcgctgcattcgctgggacgatgccgaactgaacattgactggcaactggacggcgctccaacgttgtcgcccaaagaccagaacggcaaaagcctcaaagaggcagacctgtttccatgaccgcgtcattgaaaatcctcatcaccggccagcacggccaagtctcccgggagctgcaacagcggcttcagggcttgggcgagcttgtcgtgttgggccgtgatcaacttgacctggccaacgccgatcagattcgccaacaggtgcgggcccacggcccgggcctgatcatcaacgccgcagcccacacggcggttgacctggcagaaagcgaacccgacgccgccttcgccatcaatgcagttgctccgggaattctcgccgaagaggccaaggccttgggcatcccgctgattcactactccaccgactacgtgttcgacggcaacaagcctgcgccgtacaccgaagccgacgctcccaacccgttgggtgtctacggccagagcaagctggcaggcgagcaggccattgcggctgtgggcggcgaacacctgattctgcgcaccagttgggtctattccagccacggcaagaatttcctgctgaccatgcaacgtttgctccaggaaaaaccgcacatgcgcatcgtcgccgaccagattggcgcgccaacgtgggccgggaccattgccaacagcacccgtgtgctgatcgaacgctggcaggccggccttgccggtgattggggtgtttatcacctcaccgccagaggggaaacctcctggttcggctttgccgaggcgattggcgagcatctgcgcgccagcggccacgcctgcgccgagctggaagccatcccgtccagcgcctacccgacccccgccaagcgcccgctgaactcacgcctggattgcaaccgtctgcaacagcaatggcaggtcagccagccgcagtggcaagacgcattgcgcgagtgtcttgcacagcagcactaggcataatgcgcctgtacccacaggcgcatgactcccatgactccacccctcccgcgaagaccccgctggcgcagccttgcgctgctggcgttgtgcctggcaccgctgctgtggccgctggagcatttggccgagcgttattaccgcagcgagctggccgggcaaaatcgccagaccctcgacctgtacgtcgccaacttgttgggcaccctgcaccgttatgaagtgttgccgcagatcctcggtgacctgcctgccctgcgcaccgcactggacgcgccgcacgtcagcaccaatctgaccaacgccaacctgctgctcaaggacgttgccgcccaggccggcgtggaagtgatgtacctgatggacaccaccggcaagacccttgccgcgtccaattgggacaagcaggacagttttgtgggccgcaacttttcgttccgtccgtatttcagcgaagccatggccgggcgtctgggacggttcttcggcctgggtaccacgtcagccaagcgcggttacttcttcgccgccgccgtgcgtgatggcgacacgatcattggcgtgctggtggtcaaggtcgacctggaccacaccgaaagcctgtggggcaacacgcccgaacaattgctggtgaccgaccacaacggcgtggtgattcttacctcgcgcccgcaatggcgattccgtgccacccggccgctgaccgctgaagagcgccaggcgatcatcgcgatccagccctacccgacccgtgacccgcagccgctggccctcagtgccaccgcctggttgcgccaatccactgccatcgccgaaaccggctggacggtggagatccttgcgccgcgctccctgatcagccgccccgtgcgtaccgtggtagccgtcggcggcgccaccttgctggtgttgatgctgttgctggggttgatgatgcagcgccgccgccactatctggaacggatcgccttcgaagccaaggcccgccgcgagctggaagcccgtgtggtggaacggaccagcgatctggaaggcctcaaccggcgcttgaaacaggaagtgctggagcgcgaacacgcccagcaggaactggtgcgcgcccaggatgacctggtacaggcgggcaaactgtcggcgctgggcaccatgtcggcgagtatcagccacgaactcaaccagccgctggcggcgattcgcagctacgcggaaaacgccgaaatcctgctcgaccatgaacgcaccaacgatgcccgcggcaacctcaaactgatcagcgaactgaccgggcgtatggcctcgatcatcgcgcacctgcgtgccttcgcccgccgcgaccgtcatgccccggaaagcgtggcgttgcagccggcactggacgatgccttggcgctgctggccaagcggcgacgctcgatggaagtcgaactgatccgcgacttgccggaagccacgctgtgggtgcaagccggcgaaacgcgcctgcgtcaggtgctcggcaacctgttggccaacgccctcgacgcgctcaccgaaaaaggcccgccgcgcaaactctggctaagtgccgaaaccaccgagcaaggcgtcaacctctacattcgcgacaacggcccgggcttttgcatggaagcgctgggccgcgccagcgagccgttctacaccaccaagacccgcacccagggcctcgggctggggctggcaatctgtgacaccttgatgcgtgcctttggcggcgaactgctgttcgccaaccacaaggaaggcggcgcgttgttaaccttgaaattgcgtgccggctcgccgggcgtcagtctgcaaccgtccgaggaccgcagtgtatgagtatcgataacgggattcaggtggtgttgatcgacgacgatcctcacttgcgtcaggccttgtgccagaccctggacctggccgggctgaaagtcctgaccctgggcgaagccaccggcctcaccgcgcgcctctcgcgggactggccgggcgtggtggtgagtgacatccgcatgcccggcatggacggcctggagctgctctgcgaattgcacggccaggacccggagctgccggtgctactgattaccggccacggcgacgtgccactcgccgtgcaagccatgcgcgccggcgcctatgacttcctcgaaaagcccttcgccagcgacgccctgctcgacagcgtgcgtcgcgccctggccctgcgccgcctggtactggacaaccgcagcctgcgcctggccctcagtgaccgccagcaactgagcacccgcctggttggccactcaccgcaaatgcttcgcctgcgcgagcaaatcggcgccctggccgcgacccgcgccgatgtcctgatcctcggcgaaaccggtgccggcaaagaagtcgtcgctcgcgcactgcacgacctgtcaagccgccgcagcgggccgtttgtggcgatcaacgcaggcgccctggcggaatcggtggtggaaagcgagttgttcggccatgagccaggcgcgtttaccggcgcgcagaaacgccgcatcggcaagttcgaattcgccaacggcggtacgctgtttctcgatgaaatcgagagcatgagcctggacgtgcaggtcaagctgctgcgcctgttgcaggagcgagtggtggagcgcctgggcggcaaccaactgatcccgctggacatccgcatcatcgcggccaccaaggaagacttgcgtcagtccgctgaccaggggcgcttccgtgccgacttgtactaccgcctcaacgtcgcgccacttcgcattccgccgctgcgcgagcgcggcgaggatgcattgatgctgttccagcacttcgccgacgaggccagcagccgccacggcctgccgttgcacgaactgcagccggggcagcgcgcgttgctgttgcgccacagctggccgggcaatgtacgtgagctgcagaacgctgccgaacgctttgccctgggcctggagctggcactggacaactcgccggacaacccggcggccggcgtgctgacgtccacctccgggggcttgagcgagcaagtcgagcagttcgaaaaaagcctgattgccgccgagctgacccgccctcacagctccgtgcgcagcctcgccgaagccctcggcataccgcgcaaaaccctgcacgacaaactgcgcaagcacggcctgaacttcgccgacagcgccagccatggcgctgacgacgaatgacccagcccacccgccaagaggcccccatgaaccgcgacagccgttacctggaatccatccttcaccacgacatccccctcacccgggaaatgggcctcaaagtgctcgactggcaacacggccaactgcaactgcacctgcccttgcaggccaacatcaaccacaagagcaccatgtttggcggcagcctctactgcggcgcggtgctggctggctggggctggttgcatttgaagttgcgcgaggaaggggttgaagatgggcacattgtgattcaggagggccagatcagttatccgctgcctgtcacccaggatgcgaccgcgatctgtactgccccggaggacaaggtgtggaagcgttttttggccacctacaagcgttatggccgggcgcggttggcgctggaaacacgggttgtgaacgaaggcagtgaggaccccgcagtgacgttcaccggccagtacgtcctgcaccgctaaaagccctgacgcaaaaacaactgtgggagctggcttgcctgcgatagcggtagtgaattcatcaccgccatcacaggcaagccagctcccacattaaatcaccaaccgattcaggaccgggccaggctcagcaaccgctcacgccatgccgccttcgccggcaacgccaaaaagaacgggttcaacaacgaagcccgcgccgggtagctgaaccgctcgccgctcaattccagcacctcgccaccggcgccttccagcacgccctgagctgcagcggtgtcccactgcgaagtgggcgccaggcggggataacagtcggcgctgccctcggccagcaggcaaaacttcagcgagctgccgatattcgccagtttcagctcacccaaaccttcgctcaaaccatccagcaagcgttcctgctcagggctggagtggcgacggctggcaaccacggtaaatgcttcacccgcagcaggcgtctggcgtacctgaatctgcttgggcgcttcctccacatccgaacgccacgctcccagccccgcgccaccgaagtagcagcggccgctggtcggtatcgacaccacgccaaacaccacgcggccgttttcgatcagggcaatattgacagtgaactcttcgctgccggaaatgaattccttggtgccatccaacgggtcaaccagccaccagcgctgccagccggcgcgcacgctctggtcgatatcggcatcttcttcggacaacacggggatgctcggatccagcgcggtgagaccggccagaatcaaatggtgggcagccaggtcagcagccgttacgggcgagtcatcggatttggacgtcacagccacatcagcgcgccagtacggcagaatcacctcgcccgcctgccgggccagctcaatcacgggggcaatgaaagggtggcctaaaaacagttcgctcatgcggtaaacgctccacgctgggtcaacaggtctcgtaccaggtacagcgcagccagtgcacggccctcgctgaactgctcattttgcgccagttgcgacagctcgcgcaggttcaccctgtctacacgcatcggctcgggttcatcgccttcaaggcgttcttcataaagctcggtggccagtaccacctggattttctggctcatatagccaggcgacaatgacagctcggtgatgtgctccaactgccgggcaccgtagccggcctcttccttgagctcgcggtccgccgccgccagcacatcctcgccgggctcgatcagccccttgggtaaggaaagctcatattcgtcggtcccgccacagtactcttcgaccagcaatgcatgctcggcgtcaatcattgccacgatcatcaccgcaccataaccggcgccacggcccaccaggcgttcgtaggtgcgttcaacgccattggaaaagcgcaattgcacttcttcaacgcggaacaaacggctactggcgacaatttcgcgggcgaggacggtgggtttctggcgcataaacggctccttggcgtgatcgggttactataccgtggcttttccgattgtctgtgtcggatatctttacttacatgagaacgccccatgccctctttgccctggcacgccatcgacaccatcctgctggacatggacggcaccttgctcgacctgcatttcgacaaccacttctggatggagcacttgccgcagcgttacgccgagctgcacggggtgagccgggccatggccgagatggagttgcagccgctgttcgagcgtaacgccggacagttgcaatggtattgcctggatttctggagcaccgaattgaagattccggtgcgtgaactcaagctggaaaccgctcacttgatcgccttgcgcccggacgcggatacctttctggcggccatcaaaaaggccggcaagcgcgtgatcatgatcaccaacgctcatcgcgacgcgctgtccttaaagctggaacgcatcgagttggcaccgtatttcgagcgattgatcagttcccacgattacggtttccccaaggaaagcccgcaattttgggacgccctgcaagccgacatccacttcgacccggcgcgtagcctgttcattgacgacaccttgccgattctgcgcagcgcgcgggattttggtgtggggcatttgttggcggtgaaagagccggatagcgagaaagggccaaaggacacgggcgagtttgcggcagttgatgactaccgcgaccttattgccggactctgaactgatgtgaacacagaccaatgtgggagccgggcttgcccggctcccacacaagccagcacatttcttaaagtgtattactcaggaatgcgcaaagtctgccctgggtaaattttgtccggatgcgacaacagcggcttattggcctcgaagattttgttgtactggttggcattgccatagaccgccagggaaatcgcgctcagggtgtcgccctttttcaccacgacgaaacgggcggcagccactgccgggccggatacggtgatctggtcatccacactggcaacaccggcgatattgcccaacgccagcagaatcttctctttctcttcctgggttgcgacctcaccggtcacagtcaccttgtcgccgtccaccgtggtctgcacattcggattacccagacccactttggacacgtggtccttcaactgctcgctggcgtttgcattacccggcgtcaacaggtcgacaatcttttcgccggcttccttgataaagctgaaaatgctcatagtgcgctctccttgggttttgagttcctgatgcccaagactagaccagtccagcggatttgggttccagcccagcccaagactcaaacgcgctagaatcctgcgccattggaataagcctggagcgaagatggacatcaagcagctgaaattcctcatcgccctcgacgaaacccgccacttcggccaggcggcggcgcgctgccatatcacccagccgacgctgtcgatgcgcctgcgcaacctcgaagaagaacttgatcttccattggtcaatcgcggccagcgcttcgaagggtttaccgcaccgggcgaacgggtgctggcgtgggcgcgcacggtgctggcggcctatgacggcttgcaggccgaggcggcagcctgtcgcggcaacctggtgggcacattgcgcttgggcgtggtgccgctgtcgagcttcgaccctttggcattaatgcagcagttgcataaagagcacccgagcctgcgcttcgagctgtcggcattgagctcggagcagattcttgaacaactggcgagcaaccgcctggacctcggcgtgtcctacctggagcgtttggacaatgaacgttttgactcgctggccttgggcgaaacccgtatgggcctgctttacgaccaacggtttttcagcttcggcgacactcccctgagttgggaagcgctgatcgaactgccgctgggcatgctcaccagcggcatgcactttcgccagtccatcgaccacaacttccacagccgtgggctcaacccgcaaccgttgttgcaaactgatgcggtgcatcaattgttacaagccgtgcacggtggcctgtgctgcgcagtaatgccgttggacggcggcctggatgcgctcaccgaacatttgcgcctgcaaccgatcgaggaagcccacacgctcgcacgcctggggctgatcatgcgtcgcagcgccccacgctcggcactggccgaagcctgttttgcgctgtttcaaaaatcgcagcaagacgcttgatcgacgccatctatcggtagatcagtactggcaattagacgcgaccctttgtcgcgcctagtctaaacactgatcaatccgtcggtggtacagccccatgaacgccaagcgccctgcctgcgcggcgcccgcccctgaagtgcccgcgccagccgccagccagacctaccagtattgcaacctcgaacacaccgaagtcgccagcacagccttggcggaagaagtggcgttggcgattgcctacaacgacatcagccaggcggtgatgctggtcacgccgacggatcttgaagacttcatcgtgggcttcagtatcggcagcggcattatcgccgacgttagcgacatctatgacctgaagctcagcggttcgggctccgcccaatacgcgcaggtgcagatttccagccgcgccttctggaacctcaagcagcagcgccgccaactggccggcaccagcggctgcggtttgtgcggggtcgaagccgtcgagcaagccttgcccgacctccaggtgttgcccggcgcgccgttgccacccgccgaatggctcgatggcctgcgccagcgcatcagcgcatttcagcccctgggccaatacagcggtgcggtgcatgcggcggtgttcatgaacggccagggtgaattattgctgggccgcgaagacatcggccggcataacgcgctggataaattgatcggcgccctgatccgccaaaagattccgaccgacggcggcctggcgattgtcaccagccgctgcagcctcgaactgatccagaaagtattgcgcgcaggcatccagaccctggtcagcctgtcgtcgcccaccggcctcgccctgcaatgggcccgccggcacaacctcaatctcatccacctgccgcagaaaaatgcgccgcgggtttacagccctgcgatggagaaccagccatgagccaacatcaccaagccgaccaaaccccgaccccgcgctacaagccttacaaaggcccggccggcggctggggcgcactgatcagcgtggcgcaggcctggttgaccagcgataacgcgctgaaaaacctgcgcatgatgctcaagaccaaccagaacggcggcttcgactgcccgggttgcgcctggggcgactcgccggaaagcggcatggtgaagttctgcgaaaacggcgccaaggcggtgaactgggaagccaccaaacgccgcgtggacgcggccttcttcgccaagcacagcgtcaccgcactgctggagcagagtgactactggctggagtatcaaggccgcctcaccgagccgatgcgttatgacgccgagaccgaccgctacaaaccgatcagttgggaagcggcgttcgacctggtgggcaaacatctcaacgccttgccaaacccggacatggccgagttctacacctcgggccgtgccagcaacgaagccgcgtatctgtatcagctgttcgtgcgcgcctacggcaccaacaacttccccgactgctcgaacatgtgccacgaagccagcggcgtcgccctggcgcaaagcgtcggcgtcggcaaaggcaccgtgacctttgatgacttcgaacatgccgatgcgattttcgtgtggggccagaaccccggcaccaaccacccgcgcatgcttgaaccgctgcgcgaagcggttaaacgaggcgcccaggtggtgtgcatcaacccactcaaagagcgcggcctggagcgcttccagcatccacagcacccgctggaaatgctcaccaacggcgacaaaccgaccaacacagcctacttccgcccggcactgggtggcgacatggccattctgcgcggcatggccaagttcctgttgctgtgggagcgccaggcccaggctgaaggcaaggaagcagtgttcgaccacgacttcctcaacgaacacacggccaacgtgctggaatacctgggcaagatagacgacacctcgtgggacgagatcgtcgagcagtcgggcctgacgctggtcgagatcgagcaagcggcacgcatgtacgccaaaggcaagaacgtgatcatgtgctgggcgatgggcatcacccagcaccgtcactcggtgccgaccatccaggaaatcgccaacctgatgctgctgcgcggcaacatcggccgcccgggcgcaggtctatgcccggtgcgtggccacagcaacgtgcagggcgaccgcaccatgggcatcaacgaacgcccaccggtggcattcctggattcactggagcgtcgcttccagttccaggtaccgcgcgacaacggccacaacgtggtcgaagccattcacgccatgctcgaaggccgctccaaggtgtttatcggcctgggcggcaacttcgcccaagctacgcccgacagcccgcgcacctttgaagccctgcgcagttgcgacctgaccgtgcagatcagcaccaagctcaaccgcagccatttgatgcacggtaaagacgcgctgatcctgccgtgcctgggccgtaccgacatcgatatccaggccgacggcccgcaagctgttaccgtggaagactcgttcagcatggtgcacggctccaacggccagttgcagccgctgtcgaagctaatgaaatccgagcctgcgattctcgccgggattgcggccgcgaccctgggcagcaaaccggtggattggaactggctggtggccgactacgggcgcatccgcgacctgatcgccgacaccattccaggcttcaaagacttcaacgagaagatcaaaaacccgggcggtttctacctgggcaactcggctggtgctcgccgttggaacaccccgtcgggccgcgccaacttccgcccgaacatcctgcccaaagacctgatccacgaacgcacccacgccaccggccgcgtgccggacctgatcatgcaatccatgcgttcccacgaccagtacaacaccaccatttatggcctcgacgaccgttaccggggcgtgaagggccaacgggacgtgctgttcgtcaacgaagccgacatcatccgcctgggcttcaagccagggcagaaggccgacatcgtgtcgctatgggaagacggccgcgagcgccgcgtgaagggcttcacgctgctggcgtttgatattccagcgggccaggccgcggcttactacccggaagtgaacccgctggtaccgctggaaagtactggtgatggcagccatacaccgacgtcgaaattcgtggcgattcgcctggaagcggcaagtgacactgggttgatcatggcccgctctgcctgagcagaaccgattgtggcgagggagcttgctccctcgccacaatgtaacagtgcccgcacttttactcagacacaaaaaaggccgcttttgcataaaagcggccgttccgaagtagttaaagactcgcaaaaataacttaagttccccataaaaaacagcaacttagcaaattgtatacaactgctgccaccggtcggatttcgattgtcagcgtctcgatacaacctcaggatcgcgccgtcatcctcttgaggtctccctatgaagttctcctcgattctcttgttgtcccttggcctggtcagtggcgcagccatggccggtggcaccaccgaagccggtgtgggcggcgcattgggcggggttctagggtcggttgtcggccagcaaattggcggtaacaccggctcggccatcggcgcggcattgggcggcgcgggcggtagtgcagtgggcgccgacaagcgcagccgtggcgaagccgctatcggcggcgcactgggcgccgctggcggcaacgtagtgggccgaagcgtcggcggcagcacaggcagcctgatcggcgcagccgctggcggtggcgcaggcggtgcattgggcaactacatgggcaacaaaagcgatgacgacgaccgtcgctaccgtgggcgtgataaccgccgttatgaccgtgatgaccatcgtgggcgcgggcatgcttatgggcaccgcaagaacaagcatcaccggcaccaccggtaagttctacagaacaccataaatcctgtgggagccgggcttgcccgcgatagcggtgggtcaggttggcaaatgtagcctgacactgcgctatcgcaggcaagccagctcccacagttgatcttcagggttcacaaaatcggggtcagaccaccaatcgctccaacgcatcgcgcaacggccccggaatcgtcaccggctggttcgacgcccgatccacaaacacctgcacaaaacgccccgccgcacaggcgtcttcctcgccttccttgaacaccgccagctcatactgcaccgagctgttgcccaacttgcccacccgcaagccgatttcgatgcgatccggaaaggcaatcgacgcgaaataatcacacgccgaactcaccacaaaccccaccacctcaccgtcatgaatatccaacccaccttcttcaatcaggtaggtattcaccgccgtgtcgaagaagctgtagtaggtgacgttattcacatggccatacacatcgttgtcgtgccaacgcgtgatgatcggctggaagtggcggtaatcggcgcgccggggcatggagtcaggcatgggcaggtctcgtgagaagtgggttcagaagtcattcaaatgggtttcggcccactggcgtacctcggcgtacgggtattcttccagcgcagcaaaacccggaataccccgcgctttcagcttggtaaacaacggtacgctgatgccaccgaggaaccgcgtcaggcgctccgcacccggcaaatccccgatagcttcatgatgcctgtggataaaatcaccgcacagccccatgaagtttttatccacaagcgccggcaattccggcggtggtggcagatgcgcaacgtgaccgtgacataccgagcaatgcccgcaacgctgaggtgcattttcatccccgaaataacccgccagacgctgccccaaacaatgttcggtggcaaaaagatcgagcatcgcgtgaatacgcgccacctctcccacttcgtgcgccttgaagcctgtgtataactcagcgctcaacacctgcgggtcgaagtcagtgttgtgcaggctgtagacctcggtcatctgcttgctctccagctcgatcaacccctgctcctggaaataatccagcgccttcaccacccggctgcgctcggcattgtgctgctggtacaacgcgtcgaaatccaccgtcgcccaggttcttgcgcgcgtgcacacctggataatcgccgcgacgaactgttgccgctcgccggaaaaccgcgccagcagcacgtcaggttcaaccaggtatttaaaacggtactcggcatagaacgcataacgcggcgcaatcacgcccttgagctccagctgcaccagcagcgttttcagcggtagctcgcggatgttgctgtggtccgacagtgaccgcagtaaaaactcccactgcccctcgccacgcgcagcctgcaattcctccagcacacggcgaatgccttcctgttcaggtgtgtcgccgtatacaaaattttccagcacgttgaggctgtcgcggttggccaacaccaggcagtcggacggccgcccgtcacgcccggcgcggccgatttcctggctgtagttctcgatggatttgggcaggtcaaagtgcaccacattgcggatatcactcttgtcgatgcccatgccaaacgcgatggtggcgacgatgcaattggagcgcccgcccatgaagcgctgctggatgccttcgcgtttatcgtggggcaaaccggcgtggtacgcctcggcctggatgccgttccggttcagatgctcggcaatctgctcggcggttttctgcagtgtgacgtagacgatgctcggctgattggcgcgctcgcgcatccactcgaccagacgcttgcgcttgtccacgccggctaccggctcaaccagcaagttgagattggcacggtagaagcccgtggtaatcacgtcgcttggcgcaatggcaaacttggcctgcatgtcggcaattaccttcggcgtggctgtagccgtcagcagcaaggcttgtgggatattgaactggcgctggtagtccggcagcttcagatagtccggacggaagttgtggccccactcggaaatgcagtgcgcctcgtccaccaccaacagcgagatctgcacgctttgcaggaagttacgaaagcgttcgttcttcaaacgctccacggaaatcatcaggattttcagctcgcctgaacgtgcacgcgccatgacatcgttggcgtcctcacggctctgtgccgaatcaatactgcccgctgaaataccatggcgtttcaaaaagccgagctggtcctgcatcaacgccaacaatggcgaaaccaccagcgtcaggtgcggcagcaacaccgccgatagctggtaacacagggacttgcccgaaccggtcggaaagatggccgccgccgaacgcccggccagcacggcgctgaccgcttcttcctggcccaaacgaaactgtgaataaccaaagacctgctggagggtttcgtgcataagctgtcactccattgaccgccgagtcggctcaaaaacatagccgcaaaaactcagcgaatcgagaaaggtcgcaaggaaaaaagagacaggatgatacacaggctgggggatggccgagggccgatgcaggattgttcagacgatttcgtgagaggaatgcaatccaattgtgggagctggcttgcctgcgatggcgtcctttcaggccgtatttctgtacctgaacgactgccatcgcgggcaagcccgctcccacatttgcccggttttctccagcaaatcctcgccgaccttaaattgcgggaagtatccgtaggaaaccatcaaccaaggcgtaatacccttcccaaactgcttcaaatactccctcgaccctctacataactccccttcgcctgactgaaactagcgctttcttaatgcctgtctacacggacgagacttagtcatatggccctgtatcttcaagccaccttttttctcatgctgtatttgatgctgcactctcaagtcaaagcccccctgttcagactgcgcatcgccatttcctgtctcgccacagcgcttacgatgagttgcctgctgcccaacgcggcagtcatccttagaatgcctttattgcctgtcttcatattcttgataggcttggcactcttgatcacccgcaacaaataccgccgatatcgcaaccctcacccacttctgcgtgccccgaccatgaacctggcccccaacgtccccgaagaccccgtgatgcagcagctactgcaattgctgcacgaagaaatcggcctgccgaaacacaagaccattcgcctggaaacctcgctcaacttcgacctcgcctgcgacggcgccgaggccaagcagttcatggatgcgctggaacaggactttgcagtcgacttgggcgattacgatgcttatcgatacttcaagccgccgatattcgatgtctttctgaagcgtcgagccaagggccgtggcgataaggttccgctgacgattggcatgttgtatctggcgatcaaaacccacagctgggacacgcagacactggaaaacctcagctgacgcaagaacgctgagatccaaatgtgggagctggcttgcctgcgatagcatcaccacggttggcctgacccaccaaggcgcctgcatcgcgggcaagcccggctcccacatggatctacgttaatctggtgattcgactacacaaaaaggaccttacatggacgtaacaatgggcctgctcgctgccctgctctggggcggcacggactttctggtgggcctcaacgcccgcgccgtcggcgtgaaacgcgcggtgtactttggccaggccctcggctttttgatcatgaccctgctgctggtcattttcccggccttcctgctcaaatccctcgatgctccgctgagcgtctggctcctgggcatcgccgccgccctgctcaccgtctccggggccctcgcgctgtccaaggccttcgcgctgggcaaagcctccatcgtcgccccgctggtgacgtcctacggcgtggtcaccaccttgctgtcgtgggccagcggtgaacacatcagtcaggtccagctcggttgcatcgccgtgtgcgtcatcggcgtggccctctccagcattcataaggacaacggcacgccccacaacaacccgcggcagtccatcgcttacgccatgctcgccgcattgctgtacggcaccagcttttggctgcaaggccgctacacattgccggcgttagggccgatcaccatgctgtggctgggttatctggtgggcctgtgcgttttggtggtgatggtgctgaagatcaaggacggcctgaaaatcccgccgctgaaaaactgcgcaacgttgaccggcgcgagcgtgatgaacctgggcggcttctcggcattttcgtggggcgcgatggcggggtcggtttccgtggtgacggtgatcagtacgttgtcgggcgggattgcagcgattttggggttcatatttttcaaggagcggctatccaccgtacaagtgctgggcgtggtgttggtgctggtcggcgcaatggttttgcacatcgccaactaacctttcacgcacaaaaaagccgcccctgagggcggctttttcacaccaaccgattcttacaacttaggaccggcagccttgatcgcttcgctcacttcaaacttcttgaagttctcgatgaacagaccggccaatgccttcgccgcttcatcgtaagcagccttgtcagcccaggtgttacgtgggttcaacaggccagtctcaacgcccggcacggccagtggcacgtcgaggttgatggtgtccaggtgctcggtttcggcaccgatcaacgcgccgctctggatcgctgcgatcacaccgcgcgtggtcgggatgttgaagcgtttgccgacgccgtagccaccgccggtccagccggtgttgaccaggtagaccttggagccaaagccgcgcacgcgcttgatcagcagctcggcgtattcaccggccgggcgcgggaagaacggcgcgccgaagcaggtggagaacgtcgacttgatgccgccgccggaacccatttcggtcgagcccaccagtgcggtgtagccggacaggaagtggtaggccgcttgttcttcgctgaggatcgagacgggcggcagtacgccggtcaggtcgcaggtcaggaagattaccgcgtttggctcaccgcccaggttctgctcggaacgcttggcaacgtgctccagcgggtaggcggcgcggctgttctgggtcaggctgacgttggtgtagtcggcgtgcttggcatcgtcgatcaccacgttttcgagcacggtaccgtgcttgatggctttccagataaccggctcgttcttctcggagaggtcgatgcacttggcatagcaaccgccttcgatgttgaacaccacgccttcgccccagccgtgttcatcgtcaccgatcaggtaacggctttcgtcagcggacagggtggttttaccggtgcccgacagaccgaagaacagggtcacgtcgcctgcttcgccgatgttggcagcgcagtgcatcggcagcacgtcggaagccggcagcaggaagttctgcaccgagaacatggcttttttcatttcaccggcgtaacgcataccggcgatcagcacttttttctgtgcgaagttgaggatcacgcaaccgtcggagttggtaccgtcacgctctggcacgcattcgaagttggccacgttgagcacttgccattcttcacgaccggccgggttgtactgggccgggttgatgaacaggcaacgaccgaacaggttctgccaagcggtctgggtggtcattttcacggccaggtagtggtcttcggcagcccctacgtgaacatgggaaacgaagtgctcttgcgcgttgttgaatgcctctacacgagcccacagcgcgtcgaacttgtcggccgggaacttgcggttgatcgggccccaggcgattgcgtcctgggtggaaggctcttcaacgatgaaacggtcgaccggcgaacggccagtacggtgaccggtttcgacgaccagcgcgccagtatcggcgagcacgccttcaccacgctgcagggcttctttaaccagatcatcaacactcagatcggtgtatacggcgttgttggcttgcgtcatgaggttccccgtcggcctatggccgagtgctccaaacgttttgtagtagaaagttgcgcactactaccgcgaaaaaagtgggccggattatgccagaaaagcccaaaaagagtagggccctcccgtcagaactgcgctaatccggcattcgtcaggtgatttacctgtgcttaaacgttttagtggcgggtgtcggaaggggtgtcgatgcctgcgccggcgaacaattgggctacatcagccgcatcgaacaggtaacgctggttgcagaactggcagtcgatctcgatattgccgccgtgctccactaccaaattctgcgcatcttccaggcccaggctgaccaaggcattggccgaacgctcacgcgagcaactgcaacggaagcgcagaccctgttcgtcgaacagacgcacggcttcttcgtggtagaggcggtgcaggatggtttcgttgtccagacccaacagctcttcagcggtcagggtgccagccagggcagtcagcttgcgccagctgtcagtgcgctcgtcatcgtccttgatgcggtccgccggcagttgttgcagcagcaggccccgggcgcgcttgccgtcggcgttgagccagaacttggtgcctacttgctgggacatcacgaaatagttggtgaagcagtccgacagggtttcgccgtcgaggtcgacgatgccctggtagcgctggccttcagtcgggtcgacggtgattgccagcacgccgttggccatcaggtcggacagggtcgcatccggcgcgatccggtcggcctcgtaacgggccaggccacggatttcacgctcgctggagcactcgatcatcagcatcggcaccgggccctcggaacgggcctgcagaatcagcaaaccgtcgaacttcatggtacccaccagcagcgctgccgccgccatcagctcaccgagcagttgcgcaaccggctccggataggggtgcttggcgaggacttcggcatagctgcgctccagcgagaccagttcgccgcgggcgtcgttctcgtcgaagatgaagcgttgggtgaagtcggtatccggtagatcagtcataggtctgggtatctgaattgatgacaaattggtgacaaggtttatagaattaaacgctttagcaccattttggtgcggttttctaaagtcgtgggggacagtttatgaacaatccgagtttgttccaagccaagtggaacctcgggcgatgggccatttgcaatctactcgcaatcggactgctgtgtttttggctgtggcccacgggccagatgctgtgtgtgcttttcgacgagtggctgtttcacctgcttaatgatccgctggcgagcaattccgcatggctgcatgtgtgggccgtcgccagtttgcggccgtttgatgccgtggtgggcgtgattctgcttatgctgctgattcgcggagattgggtgttcaaggccgtgcaggtgcgccaggcgttttttgggttcttcggcattctgttgctgctgctgtttatccgcctgctgttttccaaactcgcggtgcagatgggctggcagcacagcagcccgtcgatggtgatcagcggggcgattcatatgagtgagtatttccccgggctggaaaagacgtgggagttgaaggaccgttcgagccaaagcttccccggggatcatgcctcggtgttgttgatctgggggatgttcatgacggtgtttgccaagcgcatcggccaggtactggtgatctgggggctggcgatactgttcatgatgccccgcctggtggcgggcgcgcactgggggcaggatgattatattggcggggtgttgttggcgttgctagcgttggggtgggggtattacacgccctttgcggcgaaggtgtcgggtgggttgattcgagtgacggcgccagtgtttgggttgctcggcaagctgccagtcatcgggcgcttaagcgtcatgcgcacagctgggtaacaccacatattcaggtgggagctggcttgcctgcgattgcggtgggccagccacccccctattaaatttgctgacgccatcgcaggcaagccagctcccacatttgatctccttcttgctggagatttgtgcctttagtcgtcattgccactgccgcgaaacttgaacagatcacggcgctgtttcttgctcggtttgccatcagtggtcaggcccgtagcaccggccttgcgcatcgccgccgcactttcgcgtttggcgatgctggcttcggtctcggcgtacagcgtctgcgcttcaggtgcaccgcggcgcacgatggaaagtgcctgtaccacgaccgtcttttcatcaaaccctgtacgaatttgaaactcatcgccgacgcgcggctccttgccaggcttgcagcgctcgccgcgatggtgcaccttgccgctctcgatggcggccttggccagggcacgggttttatagaaacgcgccgcccacaaccacttgtccaaacggaccttttcttcctcttcctgcttttgagccacttgaattcctcgctctgaaaaatgtcgcaactttaccgttgaaacccttcgacgcataaacctcaaggctcacctaagatacgccaggcacctctggttttgcgtgattttccattgcaccgactgattatcaagacctgagagatatctgtcgccatttgccgaatattctgcgtgaataccgcgaaatcggcgctgaaccctcgatgaaggtttggggattgtcacaatccatgcgcagttggacgttactgtcctcgacgactacgaaacatttctgaattgccggttatccatattgaagacatttgaccatttgaccgttgtgggtctgcgtgagtgggtggcacttcccgacttgggagtggcgggcctgcgcgcgaagatcgacaccggggccagcacctccagcctgcacgccaccgatatcgagccgtttgagcgcgacggtgagaagtgggtgcgcttcaccgcgcacctgggcagcgtggtgcaactgcgtcaccggcgctgcgaagcgccgctggtgacgatgaaaaccatcaagagctccaacggccatgcgcaggtgcgctacgtgatcagcaccaccctggccttgggtgatcgggtatggcgggtagagttcaccctcgcctgccgcaaggccatgcgttatcgcctgttgctgggctccaaggcattgattgacggccagttggtcgtcaatccgggcgtcaagtacgttcaagacaagccggtgttcccggtctctactatttctgccccaggtgctgcatgaagattgctgtgctgtcgcgaaacccgcgtctgtattccacccgccgcctggttgaggccggcaccgaacgtggccatgaaatggtggtgatcgacacgttgcgtgcctatatgaacattgccagccacaagccgcagatccactaccggggcaaaccgctggaaggctttgatgcggtgatcccgcgtatcggcgcttccgtgacgttttatggctgcgccgtgttgcgccagtttgaaatgatgggcgtgttccccctgaatgaatccgtggccattgcacgctcacgcgacaagctgcgctcgttgcaactgctgtcgcgccggggcatcggcctgccggtcaccggctttgcccactccccggatgacattcccgacctgatcgaaatggtcaacggcgcgccgctggtgatcaaggtgctcgaaggcacgcagggcattggtgtggtgctgtgtgaaaccgcgaccgccgccgaatcggtgattgaggcattcatgggcctcaagcaaaacatcatggtgcaggaatacatcaaggaagcgggcggcgcggatatccgctgcttcgtggtgggtgacaaagtgattgcggcgatgaaacgccaggccaagccgggggagtttcgctccaacctgcaccgtggcggcagcgccagcctgatcaagatcaccccggaagaacgcatgaccgcgttgcgcgccgccaaagtgatggggctggccgtagcgggtgtggatatcttgcgctccaaccacgggccgttggtgatggaggtgaattcgtcaccgggtctggaggggattgaaaccaccacggggaaagacgtggcggggattatcattcagcacctggagaagaacggtgggccgaatatgacgcggacgaagggcaagggctgatacacacccgctaaataattgtgggagctggcttgtcgggtcgccgcaccgctgcgatagcatcacctcagtattactgatacaccgaggtgtctgcatcgcagcggtgcggcgacccgacaagccagctcccacacaagccagctcccacatttcgttatggtgtttgtcagaccgcgtctcggggaagcatcaagccaagcggcaaccgcacccgcgcttccaaaccaccctcttcgcgattgcgcagttcaacattgccgccatgcatcgaggcaatccgtcgaacaatcgccagccccagcccggtgcccttgccgccccgcgcacggtcgccacgggtaaagggattaaagatcccctcaagctcgtccggatcgatccccgcgccacggtccatcacgctcagcaccacataaggcgcggcgctgtcaccggacacataagccgctacttccacatccgaacctgcgtgatgcaaggcattgccgatcaggttgttcagcaggcgtttcatcgacacccgacgcaaggcaaacggctggataggctccagacgcatacgcacctgttcaccattctggttgtaaggcgccaccacttcgcgcaccaggtcagtaagatcgacctcctccacgacttcgtcgcgaccgtcgcggataaacgccaggaactggtcgagaatcgcatccatgtcctcgatatcgcgaaccatgtcatccgtcaggtcgctatggtttcccatcagttccagagacagccgcaaacgtgtcagaggcgtgcgcaaatcatgggacacccccgccagcatcagctcgcgctcgcgcccggcctgctcgacatcctccgccatctgattgaacgcaccgtacacctcggtcatctcgctcggcgtatcgctgactggcaggcgcacgctgcgcccctgccccaactgacgcgcagcgaacaccagtcgtttaagcggttggttgagctgacgaacgaaaatccacgcggatgccgtggaaagcaagccgatggccaggaaccagcccaacacgttccagatcttctgcccccgcaacggatgcgggtacagcggcactttcagccagtcctggcccaggctcggcgcgcgcacccacagtgcgggcgaaacatgcatacgcaggcgcacctcggtgtcttcacccagttcggcctgcatctggcgctggtaaatctcgctgtagggccaatgttgctcgccttcgggcacacccgcgcccgccacgcgaaccagagtagcggccttggcgatcttctcgcggttctcggggtccgccgcccaataagcgcgcaacgtgagggctacaccgtggctgtattgccggtctaccagcacgtcctcgttcatcaacagataaaccagagtcagcgcctttgagaacagaacgacgatcagcaccagccaaagggtgcgggagaagaaactttgcgggaaccacagcggggttttcataggagacagctggacaccttgcagaaacgagcggcgctcgcagaattgcagaaggcgggcatcacgtcgaccctcgtagaatcaaacgtcaggatgcccgcccctgcaaatcattgatcacttggtagcggtgccgtccggcacaaacacataacccacaccccacaccgtctggatgtatcgcggcttggacgggtccggctcgatcatccggcgcagacgggaaatctgcacatcgatggagcgctccagtgcatcccactcacggccacgggccaggttcatcagcttgtcgcgcgtcagcggctggcgagcgttcatcaccagcgccttgagcaccgcgaactcgccagtggtcagcatgtgcacttcttcgccacgcttgagctcgcgggtcgccagcgacagttcgtagtcgccaaacgtgacactttcgtcttcgctgcccggtgcgccgggaaccgctggcgcctggcggcgcaacacggccttgacccgcgccatcaactcgtcagggttgaatggcttggcgaggtagtcatcagcgcccagttcaaggcccttgatgcggctcagctcatcgcccttggcggtgagcatgatgattggaatctggttgttcgcgccacgcaggcgtttgcaggcggtcaggccgtcttcgccgggcagcatcaggtcaagtacgaccaggttgaatacttcgcgtcccagcaggcggtccatctgctcggtgttcggcaccgcgcgggcacggtagcccttggagttgaagaagcgctccagcaggctgctcagcccagggtcgtcgtcaacgatgagaattttttcgccttcagcagtttgtgcagtgctgctcattagatgctcctcttatctcggcgcgcattatggcgtagctgccgttatacgcaccgtgtgcattgttagcagatttttcctccagtgccactgaacccgcgccctacaaccattggcaaggtgcccccaaccacagaacgctggttataatgcggcgcctttgtgctgggtggcatcagatatttcccgttcaccgcacggctttttttcacccgttctccgtgactttttcgatttcgagggtcaataggctgcctcttgacccaggcagcggcgccagtcgggccgctcaaccagcctcgcaaggccttgttttccgggcctgcgagctgctttcagaatctcaggtggttttatggacagcatcaacagccgcatcgccgaggaactcggtgtacgcccgcaacaggtcgaagcggccgtcgctctactggatgaaggctccacggtgcccttcatcgcccgttaccgtaaagaagtgaccggcagcctcgacgacacccaattgcgtcacctggaagagcgtctgcgctacctgcgagaactcgacgaacggcgcatcagcatcctcgccagcatcgaggaacagggcaagctgaccccgcaactggaacgcgacatcaaactcgccgacaccaaaacccgccttgaagacctgtacctgccgtacaagcaaaagcgccgcaccaagggccagatcgccctggaagccggcctgggcgagctggccgacggcctgttcaacgacccgtcgctgaccccggataccgaagccgcacgcttcattgacgccgaaaaaggcgtggccgacgtcaaagcggctctggaaggcgccaaatacatcctcatggagcgcttcgccgaaaacgccggtttgctggaaaaactgcgtacctacctgaagcaggaagccaccctcagcgcccgcgttatcgccggcaaagaggaagaaggcgccaagttccgcgactatttcgaacacgacgaacccctcaaaagcatgccgtcccaccgcgcgctcgccattttccgtggccgcaacgaaggcattctcagctcagcactgaaagtcggtgacgagctgccgggcaccatgcacccgtgcgaaggcatgatcggtcaacaattcggcatccagaatcagaaccgtcctgcggacaagtggctgggggaagtcgtgcgctggacctggaaggtcaagctctacactcacctcgaaaccgacctgctcggcgagctgcgtgacggcgccgaaaccgaggcgatcaacgtgttcgcccacaacctgcacgacctgctgctgtccgccccggctggcccgcgcgccaccctgggcctcgacccgggcctgcgtacgggctgcaaggtcgccgtggttgacgccaccggcaagctgctggaccacgccaccgtgtacccgcatgtgccgcacaacaagtgggaccagaccctcgccattctggccgccctgtgcgccaagcacgccgtggacctgatcgccatcggcaacggtaccgccagccgtgaaaccgacaagctggccgccgagctgatcaaaaaatacccggccatgaaaatgaccaaggtgatggtctctgaggccggcgcttcggtgtactcggcgtcggaactggcgtccaaggagttcccggacctcgatgtgtcgatccgtggcgcggtgtcgattgctcgtcgcctgcaggatccactggccgagctggtgaagatcgatcctaaatccatcggtgtcggccagtaccagcacgacgtatcgcagctgaaattggcgcgtggcctggatgcggtggtggaagactgcgtaaacgccgtgggcgtggacgtgaacacggcttccgtggcgctgctggcccgcatttccggcctgaacgccactctggcgcagaacatcgtcacccaccgtgacgagaacggcgcgtttaaaacccgcgccgcgctgaaaaaagtcgcacgcctgggcgaaaaaaccttcgaacaagccgccggcttcctgcgcgtgatgaacggcgacaacccgctggactcctccgccgttcacccggaagcctacccgctggtgcaacgcattgccgccgagaccgaccgcgacatccgctcgctgatcggcgacgccgcgttcctcaaacgccttgacccgaaaaagtacaccgatgaaaccttcggcgtgccgaccatcaccgacatcctgcaagagctggaaaaacctggccgcgacccgcgtcccgagttcaagaccgccgagttccaagaaggcgtcgaagacctcaaggacctgcaactgggcatgatcctcgaaggcgtggtgaccaacgtgaccaactttggcgcttttgtggacatcggcgtgcatcaggacggtttggtgcacatctccgcgctttcggagaagttcatcaaagatccgcgcgaagcggtgaaagccggtgacgtggtcaaggtcaaggtcatggaaatcgatatcccgcgtaaacgcgtgggcctgtcgatgcgcatgagcgatacccccggcgaaaaaatcgacggtgcccgtggtgcacgcccgggctcggcaccgcgccagtcgcaaaacaacgcgccgcgcaaagagaccgcaactgccgcaccgagcaacaacgccatggcttcgctgttcgccaacgccaaacagttgaagaaacgctgatggaaatcccggccggtttgacccagagcgccttcagcgaactgatcggctgccgcctgcaacgccttgaagaaggcgttgccgaggtggccctgaccctggagccgcagctgcgcaaccgcgcgggcaagctccatggcggggcgattttcagcctggtggacatcacgatggggttggcctgctccagcgcccatggtttcgaccagcagagcgcgaccatcgagtgcaaaatcaactacatccgcgccgtggaaaacggcgatgtgctgtgcaccagccgggtgattcacgccggcaggcgcacgctggtggtggaagccgatgtgtaccaggacgaaaaactggtcgcaaaagcacaaggcaccttcgctgtcctatagctccctgccctcgatttgagttaatttcggcgctgcgatgacagcgtcggaattttcttgccgcgcgatagccatattcaaggagtgaagtcggctttttcagagcgagtcaaatcgactcaaaaccaggcgatcacgccagttttaacttcacccttgtagaccgtcctgcccacccccatattggggcgactgacgcgtgaaggaatccaacttgagcgaacttctcaaccgccgcctggccctgctcggcaagcgcgaacacctctccctgctagagcagtgcttgcacggcatcgagcgtgaatgcctgcgcgttaccggtgaaggtcgcctggcgcaaacgccgcaccctgaagccctgggcgctgcgttgactaacgaattgatcaccaccgactactcggaatcgctgctggagttcatcactcccgccctgccgaacccggccgataccctgagcagcctggacaagatccatcgttttgcctacaccaagctcggcagcgaatacctgtggagcccctcgatgccgtgcccgttgccggccgaggaagacattccgattgcctactacggcacgtccaatatcgggcagctcaagtatgtgtatcgcaagggcctggccctgcgttacggcaagaccatgcagtgcatcgccggcattcactacaacttttcgctgcccgaagcgttgtggccgttgctcaaagaggctgaagggtttgtcggcactgaccgcgactaccagtccactgcctatatcgcactgatccgcaacttccgccgctacagctggctgctgatgtacctgtttggcgcctcaccggccctggacgctggcttcctgcgcggtcgttcgcaccagctcgaagtgctggatgccgataccctgtacctgccgtacgccaccagcctgcgcatgagcgacctgggttaccagagcaacgcccaggccggccttacaccgtgctacaacgacttgaacagctacaccgacagcctgcgcgaagcggtggcaacgccctacgcaccgtacgtcgaagtcggcacccacaaggacggtgagtgggttcagctcaacaccaacatcctgcagatcgaaaacgagtactactccaacattcgccccaagcgtgtgacctacaccggcgagcgaccgatccaggcgctgatggcccgtggcattcagtacatcgaagtgcgttgcctggacatcaacccattcctgccgatgggcatcgacctgccggagtcgcgtttcctcgacgccttcctgttgtactgcgcgttgaacgacagcccgctgttcgccgccaacgagtgcggcaatgccacctccaacttcctcagcgtggtcaaggaaggtcgccgtccgggcctgcaattgcagcgtcagggccaggcggtggacatgaaggaatgggccaccgagttgctggaacagatcgcaccgctggccgccttgcttgacgaaagccaggggatcaccgagcacagccaggcgctggacgcccaactggcgaaggtcaaggattcatccctgaccccgtcggcccaggtgttggcggcgatggccgagcgcaaggaaagctttgcacagttctcgctgcaccagagccaggtgcatgccgagcacttccgcaaggaaccgctggcagccgaagagcaagcgcgcttcgaagaactggcgcgcacgtcgctggcgcaacaggcggagctggagcagaacgaagtgggcgattttgatgtgtttgtcgggtcgtatcaggcaagcattctcgccatcagcaactaaaagccttgcgccccctgtggggctcagcttgtgtgggagctggcttgcctgcgatgcagacgactcggtgtatcagtgatacccaagtgatgctatcgcaggcaagccagctcccacatttgcctgcgccagactgaagatttggctccacgcttctcctcataagctaattcgaaaatgttatttattttcgagttcttagatcatttagtctcctcacacgccgaccctcggccgcctgattgaggagcttcccccttgaaactgcttacccctctgcgcctcttggctgcattgtccctggccggtgccagcctgtttgcccaggcggcggatgtgaccatcgcttaccagaccaccgtggacccggccaaagtcgcccaggccgacggcgcgtatgaaaaagccatcaacgccaagatcaactggcgcaaattcgacaatggtgccgacatcatcgccgccatcgcctccggcgacgtgcagatcggctacctcggctcaagcccgctgaccgccgcgattacccgcaaagtgccggtagaaactttccttgtcgccacccagatcggcggtgcagaagccttggtcgtgcgcaatggttcggggatcaacaacccgcaggacctgatcggcaaaaaaatcgccgtgcccttcgtttccaccggccactacagcctgctggctgcactgaaacactgggacatcgacccctcgaaagtgaccatcctcaacctcgcaccaccggcgatcatcgccgcctggaagcgcggtgatatcgacgggacctacgtgtgggacccggccctgggcgtcgccaaggaaaacggcaaggtgctgatcacttccggcgaactggccaaagtgggcgcaccgaccttcgatgcgtggatcgtgcgtaaggattttgccgagaagcacccggaaattgtcacggccttcgccaaagtgaccctggatgcctacgccgcctaccgcaaagacccacaagcctggatcgccgacaaaaccaatgtcgacaagctggtgaaactctccggcgccaaagccagtgacatcccattgctgctgcaaggcaacgtttacccactggccgctgaccaagtgaccctgctgggcgcaccgaccaccaaggctgtcaccgataccgccgcgttcctcaaggagcagggcaaggttgacgccgtgctgccggactacgccccgtttgtcagcgccaagttcatcactcactgatcgggagttcattgcgatggccttgctacagctggagcgcatcagcgcacagtacccaggcgccacagaaccggtactgtctgacatttcaatcgacctggggccccagcaattgctggtggccctcggcccgtccggcagtggcaagacttcgctgttgaacctgattgccggctttgtcgaaccctcttccgggcgcatcactcttgatggcgtgccggtcaagggccccagcgccgaacgcggcgtggtgttccaggacgacgcgctgttgccctggcaggatgtgctggccaacgtcggcttcggcctggagttggcgggtgtgcccaaggcgcaacgtgaagtgcgcgcccgggaaatgctcgcattggtggacctggccggtttcgacagccgccgcatctggcaactctcgggcggccagaagcaacgtgtcggcctcgcccgcgcgctggcggctgacccgcgcgtattgctgatggacgaacccttcggcgccctcgatgcctttacccgcgaacagatgcaggagttgctgctgcaagtctggcggcgcacggccaagccggtgttcctgattacccacgacatcgaagaagcggtatttctggccaccgatttgatcctgctggcacccaaccccggccagatcgtcgaacgcctgagcctggatttcggccagcgctacgctgccggggaatcggcacgggcgatcaagtccgacccacgctttatcgaaacccgcgaacacgtgctgggcaaagtgttctcccaacggcaggtgtccgcatgagcagctacgaacttccggccaccgccgccaaaccggtagcgcacgccgtaatccctgtgcgccgcagtgtgagtacacgctggatcagcgtactcaccttgctcgccttgctggccatttggtgggccgtcacggccaccggtttgatcgagccgctgttcctgccaccaccgtccgccgtgctgcaaaaaggctggctgctggcgaccaccggctatatggattccaccctttggcagcacttgggcgcaagcctcagccgtatcggcctgggcctgggttttgccgtgttgaccgccgtgcccgtggggattgccatcggttccaaccgcatcgcgcgcggcattctcgacccgctgatcgagttctaccggccgatccctccgctggcctatctgccgttgatcgtgatctggtgcggcatcggcgagctgtccaaggtgctgctgatttacctggcgatttttgcaccgattgccatcgcgaccgctaccggcgtacgcaccgtcgacccggccaaattgcgtgcggcgcagtcgctgggcgccacccgcgcacaactgattcgccatgtgatcctgccaagcgccctgcccgacatcctcaccggtgtgcgcatcggcctgggcgtgggctggtccacgctggtggccgccgaattgatcgcggccaccagcggcctgggtttcatggtgcagtcggcagcacaatttctggtcaccgatgtggtggtgctggggattttggtgatcgccctgatcgccttcgccatggaaatgggcctgcgtgccctgcagcgtaaattggtgccctggcatggccaggcacactgagtgagaaccgcatgagcagcctgaccgttacacccatcagcaccgccctgggcgccttgatcagtggcgtcgatatcacccagccgttgaacattgaagagcgcgacgccattgaacaggcattgctcgcacactcggtgctgttctttcgcggccaagccatcaacccgcaacaacaagcgcggttcgcggcgaacttcggcgacctgcacattcacccgatctaccccaacgtgccggaacagcccgaagtgctgatcctggacaccgccgtgaccgacgtgcgtgacaacgctgtgtggcacaccgacgtgacctttctgcccactccggcgctcggcgcagtgctcagcgccaagctgctgccggcgtttggcggcgatacgctgtgggccagcgggattgcggcgtatgaggcgctgtccgagccgttcaagcgcttactcgacggtttgacggccacccacgatttcaccaaatcctttccgctggaacgctttggcaacactgccgaagacctggcgcgctgggaggaaacccgcaagaagaacccgccactgtcgcacccggtggtgcgcacgcacccggtgagtgggcgcaaatcgttgtttgtcagtgatgggttcacgaccaaaatcaacgagctggaaccggcggaaagcgaagcgattctgaagctgctgttcgcccacgccacccgcccggaattcaccattcgctggcgctggcaggaaaacgacgtggcattctgggacaaccgcgtgacccagcactacgcggtggatgattaccggccgcagcggcgggtgatgcaccgggcgacgattctgggtgacgtccccttctaaagcctggcgcagatccaatgtgggagctgccttgtgtgggagctggcttgcctgcgatagcatcaccgcggtctaacagacacgccgaggtgcctgcatcgcgggcaagcccggctcccacattgaccgggttgtgccaactttactcgcaacgctagagaaccaatgtgggagcgggcttgctcgcgaaggcggtgtatcagtcaaatacgtatcgactgacactccgccttcgcgagcaagcccgctcccacaatttgacccatgggtgtcaggtcattcagctgtggatggcttttcccacaggttaatcccgccttcctgcgcaaaccggtcgatctccgccagttcttccgcgctgaagctcaggttcttcaacgcaccgacgttttcaatgatctgctccggccggctcgcaccgatcagtgcgctggtcacacgcgggtcgcgcagggtccaggccagggccagttgcgctaggctttgaccacggcgcttggcaatctcattcaatgcgcgcacgtgggcaatgttggcgtcggacaggtgtttggcttgcaacgaaccgccacccgggcggttgacccgcgcatcggccggcacgccgttgaggtacttgtcagtcagcagaccttgcgccaacggggtgaatgcaatcaccccggcaccgagttcttcggtggtgtccagcaggtctttttccacccagcggttcagcaggttgtaagccggctggtgaatcagcaacggcactttccactcttgcagcaaggccgccatctcacgggttttcacgcccgagtacgaagagatgccaatgtacaacgccttgccctgttgcacggcggtggcgagggcactggcggtttcttccagcggggtgtcggcgtcaaaacggtgggagtagaaaatgtccacgtagtcgacgcccaggcgttgcaggctctggtccaggctcgccaacacgtatttacgcgaaccgccgccctggccgtaagggcctggccacatgtcccagccagccttgctggagatgatgagctcgtcgcggtagtgcttgaagtcttcgcgcagcaaacggccgaagttgatctcggcgctgccgtaaggcgggccgtagttgttggccaggtcgaagtggttgatccccaggtcgaacgcagtgcgcagcagggcgcgctgggtgtcgatgggggtgctgtcgccaaagttgtgccacaggcccagggacagtgcaggcagcaccaatccgctgcggcctacgcggcgatacggaatagattcatagcggttttcggcagcaatgtaagtcatcgaatcctctcttgaacttgggacaaataaggcccgggaacaacgatattcccaggccttttaagcagctgaatcgcttaagtctgccgttccgttctacagcaatttcctaccagaggggaacgacatagctgacatagaagcggttttcatcctgcacggttgcgccggtgatatccgggctggcatgcgcgtttttccaggtcacgcccaggcctttgagggtgccggtcggtacctgataagccacggcaatgttgcgttcccactcactggtggtgccttgcacggtacggatgtcatcaccgtgggcataggccgccgagaacgacaggcccgtaaggcccagcttaccgaagtcatacttgtactgtgcaagccaagtgcgctcaccggcgtgttgaaatttattcaactgcatgttggtcagcgccggggtatcggcgcccgagcccgggccctggcggttgtcgccgctgttcaggccagaatccaggtacgggaaatcgctgtcgccgctgtttttctgaatacccaggccgaccgtgtgaccgtccaggctgtagctttcaagcaagctcgcggtggtttggttgatgcggcctttggaggtgccgtcaccgtagaggccggcaccggcaaaatctttgtcgccgtcggcgttttcgcccacacccaggctgcggaatacgcggatgtcggtgtcgattgcaccgaccgacaaggcgtcatgccgcttggcaccgaggaagaactgttggtagtaatcctcaaggttggaataccacaggctgacggtggtgttctggatcccggtgtaatccgcgccgccgaacaggaagcggtcgctttctttggtgccgccggcggtgatcatgccctggtcgccggtctcgttacgaatcttggtcttgaagatatcgccgccggtgaaggtgaaatccgtgaggtctttggacaccaactgcacaccggtgttggtctgctggtacaggcgcccgtcagtgttggccagcaccgggttgttgccgaacaacgtaccgacgcgcagctcatccttggcaaaacgcatcttgaacgtcgggctcagcacgccgaactggtcggcggatttgccgttgtccagcgggaacatgctgccggggtagcggccctggtgatccttgtcgttgaggtcgccgccggagtcgagtttcaggccatagaacgcctgcaaatcgagaccaaaacccaccggcccctcggtgtagccggacttgaagttgaactcgaaaccctggccccaatcacgcacgctgtgcgccttcgcgttgctgcccaccacatcacgcccctgctggttgaggtagcggttgagcagggtcacatcggcgtggctgtcatcaataaagtcggcgtgggcggacagcataaagctcgccatggcggcacccaccatagggcttattaacgtcttcattgttaccaatctccgtcactgttctgaaatgaaagcgtcaaacgcttcacacaattacgcagtggccagatgacagttcggagtcaaaacggttagttcacgaatgaaattaaatttaagcaaccctttaacgacgcgggttagcgggcattttcgaagatttcggcgagccaatcgacgaacacccgcaccctcggcgacatgtgtcggttatgcggatacaacaccgaaaccggcatcaacggcggcggtgtttcggccaggatttcacgcatcacaccctgctcgatcagctcggccatgcggtaatgcgggcactggataatgcccaaaccggccactgcactggcggagtaaatttccgcgccgaacaccgaaagcgcgctctcgatttccacctcttcaagttcgccatcgaccatgaattcgaacgggaacagcttggccgtggtgcgtgaaacgtagttcaccgcacggtgccggctgaggtccgccagattcttcggctcaccgtatttacgcaggtaggcggggctcgcgcaggtcacttggcgcaaggtcgccacgcgccggccgatcagcgccgagtcacccaaagtgccggcgcgcagcacgcagtccaccccttcggcgatcaggtcgacaaagcggtccgcctcactgatcgacagttcgatttcggggtaacgcgccatgaattgcggcagcgccgggaccacaaaatacttggccagggtgccgtgcaaatccacgcgcaaacggcccttgggcgccacgctgcgaaacgccaattcagcctcttccagttcggccagcagttgcacgcaacgcaggtaatacgcctcgccgtcgagggtcgggcgcacgcgacgggtgctgcgttccagcaggcgggtgccgagccaggcttcgaattgattgagggtgtgggtcagcgtggcgcgtggcaggttcaaatcttcggccgccagcgtgaagcttgagcgctcgtatatgcgcacgaacaccttcatcgctttgacttgatccacacgggaatcctcgggttgattgttggcgattattgaacagtcaaggcaactctggcgcatttatcacccagggtaaacatgtgaatctgcgctcacacccacttcaaggcattcacaccatgacaactcaagtagcaatcatcaccggcgcttcccgtggtatcggcgctgttgtcgcccaacaactcgccgccgacgggtatgccgtggccatcaactacgccagcagcgccactgaggcgtcgaagctggtggtggaactgcgccaggccggccacagagccatagcgattcaaggcgacgtgtccaaacccgccgacatcaagcgcctgttcgacgaaaccgaagcgcagctgggcaaggtcgatgtgttgatcaacaacgccggcatcctcaaggcactgcccctggcccagcacagcgacgagctctacaaccagaatttcgacatccacacccgtggcaccttcaacgccttgcgcgaagcggccacgcgcctgaatgacggcgggcgcatcgtcaacttttccagcagcaccgtgggcctcaacttccccggctacgcggtgtacatcgccagcaaggcagcggtggaatccctgacccaagtgtttgccaaggagatgcgcggtcgcggtattaccgtgaatgccgtcgccccgggcccggtggccaccgagctgttcctgcacggcaagagcgaagagcagatccagggcctggccaagatggcgccgctggaacgccttggccaaccggaagatatcgcccgcgtggtgtcgtttctggtgagcccggcgggtgcctgggtcaacggccaaatcctgcgcgccaatggcgggctggtctgaattcactcgaggagaacagcatgaaatcgatcatcctgattaccggcgcctccagtggtttcggcgccctcaccgcccgcgcgctggccgacgccggccacacggtctacgcgagcatgcgcgaaaccctggggcgcaacgcagcgcaggtggccgaggtgcagcgctatgccgaccaacacagcgtggatttgcgctgcgtcgaactggacgtggcctccagcgattcggtagaggctggcgtcgccaagatcattgccgactgcgggcgcctggatgtgatcatccacaacgccgggcatatgtcgttcggccctgccgaagccttcacgccggagcagtttgcgcagctgtacgacatcaacgtgctgagcacccagcgggtcaaccgcgcggcgctgccgtacttgcgcaaacaaggcaaaggcctggtggtgtgggtgtcttccagcagcgcacggggcggtaccccgccgtttctggcgccgtattttgcggcgaaggcggcgatggactccttggcggtgtcctatgccagcgagctgacgcgctggggcatcgaaacctcgatcatcgtgccgggcgcgtttaccaagggcaccaaccactttgcgcactcgggcaaaccggcggatcaagcgcgtgttgcgctgtacaacgatggcccttatgccggtgtggcggatgccgcgttgcacggtttggcggcgctggagcctgcggacgcggatgtgggcgaggtggccaaagccatcgtcaagattgttgatttaccgttcggcacacgcccgttccgtcggcatatcgacccgtccgaggatggctgtgaaatcgtcaatggcgtggccgaccgggtgcgggcggagttgttttggaaggtcggtttgcaggacttgctcacgccgactatcactttcaaatccgaatgaggtcccccttgtgggagcgggcttgcccgcgatggcggcgggtcagccagcaaacctctgactgacagaccgctatcgcgggcaagcccgctcccacaggagaacgtcgcaatgcacattgtcaccgtcattatctgcggccttgttttgctcgccctgatgctgttcattgggcaaaagctgggtgtcagccgacatctgctggcctacagctttgtggggatctggttggcggcggccgtcgtcaacggcgctatcggcgtcatcaccgccggccagcccctggtgtcggagctggtgatcggcagtggggtattcggcgcgccgttggtggcactggccctgtacctcagggcctgaacatcagcgcaccaggtgcaggaactgcaagtggcgctcgtactggtcgaggatgtcgttgatgatctgctctttggtgtaaccgaccaaatcgtagtcctgactgccctcgctcaagtgcacttcagcgcgataatagcgacggttgttgagctccttggaacccatgccgccacgggcgaaagacggcgtgaagtagccacgcatctgcacttggtaaacgaacggatgttcctcgccatggccgatttccaggctgacgctgtcgttggccgggtcaggctgagtgacaacattcaggcccttctcgacaaacaccgcagtcacttcttcgatcgccgggcgcaccgtggagtcgaggaagcggtacacctcgtcgcgcgaagggaaatgcacggcctggctcaagcgctgtcgccagccgccccggcccttgcgcgccgccgagatcggcgccagcgaatgcaactgggcgatctgtttttgcgactcaagatggaaggctttgtgcaggccccacatcatcaacagcaggatcatcgagaacggcagcgaggtcagcaccacggctgatttgagcgagtcgatactgccggcaaacagcaacgcactggtgaccagcgcggtcatcgcgccccaaaacacgcgcagccatttcgggccgtcttcgtcggcattaccgcctttggacgacagggtcgagagcaccaccgtgccggagtcggccgaggtgacgaagaacacgaagctgataaacaccgtgaccgcgatcaccgttttgctccacgggtaggtttccagcagcaggtagaggctcatcgacggatcatcgatggccgactggccgagcgcagtcaaaccgtggttgagcacttggtcgatggcgctgttgccgaagatcgacatccacgccagggtgaaacccagcgggatcagcagcacgccgaacacgaattcgcggatggtccggccacgggaaatgcgcgcgatgaacaagcccacaaacggcgaccatgcaatccaccaggcccagtagaacaccgtccagccgcccagccagtcgctgggtttgtcgtaggcatagacgtcgaaactcttggtcggcaaggcgccaaggtagtcgccgatgttctggatcaaggtgttgagcaaatgctgggtgggccctgcgaacaacacaaacagcagcagcgcacaggccagcagcatgttgatgtcggacatcacccgcacacccttgtcgacgccagccacggcgaccaggatcgcggcgcccatcatcaaagtgatcaggccgacctgaatccattgggtgtgggccacgccgaacagataatccagcccggagttgaggtgcaacacaccaaagcccatgtcggcaccaaggccaaagaccgtggcgatgatgccgaagccgtccaccgcgtagccaatcggcccattgatgcgcttgccgatcaacgggtacagcgccgaacgcagcgccagcggcaggttatgccggtaggcgaagtacgccagggccatgccgacaaaggcgaacacgccccagccgtgcaagccccagtgcagaaacaggatctgcatggcctggcgcgcggcgtcggcgttcattggcgcgccttgcggcggttgtaccaagtgcgtcaacggctcggagacgcagaagaagaacagcgtaatgctgatcccggcggcgaacagcatgccggcccaggacagataactgaattcgggctcgtcgtggtcggcaccgagttttatcttgccgtagcccgatagcgcggtgaccaccacgaagaccagatacagcgtcatcgccagcatgtagtaccagccgaccgtattggccgcccagttttgcgccgccaggagccaggcaccggcctgttccgggatagcgatgaccgtgatgccgaacagcaggatgaaggtggcggcgaagtagaaaaccggcgcattcatgcgcacttggccgctggcaggggtggacgatgcactcatgaacgatgcaccccgagggtgtgggatgtggctgtaaataacggactcagcaaaggtaagcctcctgttgtgagcgggcagcgaaccaccgggtttaacttgaacgagcattcaagttaaacatggataggcggtctgggactaattgcagggctgagtggtaggtaattcctacactagctcaaggaaaggtatgacgggcggggatggcaaatcgttcagcaacttgaaattgaaatgcagataaatgtgggagctggcttgcctgctcccacagggacgggggtgtggcttacttttgcgcaccatcctcatgctgcaagttcgcctgggtgatattcgcccccgccggcacgctgcgggtcagccacacgttgccgccgatggtcgagcctttgccaatggtgatgcgtcccaaaatggtcgccccggcgtagatcaccacatcgtcctcgacaatcgggtgacgtggatggcccttctgcaactgcccatcctcgtccgccgggaaacgcttggcgcccagcgtcaccgcctgatagatgcgcacgcgctcgccgatgatcgccgtttcgccaatcaccacaccggtcccgtggtcgataaagaaactcgggccgatctgcgcgcccgggtggatatcgataccggtggccgaatgggcaatctccgcactgatccgcgccagcaacggcaacccggcgcggtacaggtgatgggccaggcgatggtgaatcaccgccagaatccccgggtagcacagcagcacttcatccacgctgcgcgccgccgggtcaccgtggtaagcggccagcacgtcggtgtccagcaagctgcgcaaggacggcaacgccagggcaaagtcctggatcaggcgaatggcgagcgcgtcgacttcactgtcatccttggcgccctggcgagcggcgtaacgcagctccaggcgagcctggccgagcaaggcattcaaggcgacatcaagggtgtggccaacatagaaatcttcactttcttcacgcaggtccaccggccccaggcgcatcggaaacagcgcgccgcacagcgcttcaagaatctgtgccacggcctcgcgggacggcagctcgcgaccgccgtgctcgccactcaggcggccattgcgcgtgcgccactggtcccgggcgctgcgcagctggctgacgatggtctgcaattgccaatgactggaacgctcactcacggtattcactcctgacgtaatggccgtcactttacggtatgcaccctgatcgcccttaagaaccaatggtgtgatgccaagaactttccgtcataagcgattgcaggttgcccgaagaaaagtgcctgcctatagtcgccccatcccttagccactgtgcgtcgtcatgatcaaaagacagctcgaccgttttaaccgcctggaactgctgggcggcgccaccgccctggaaaaactcgagcggctgtcggcctggctgggccgggacatttacgtcaaacgcgatgacaccacgccactggccatgggtggcaacaagctgcgcaaactcgaatacctcgcggccgacgccatcgcccagggcgccgatacgctggtgacggcaggtgcaatccagtccaaccacgttcgccagaccgccgcgctggccgccaagctgggcctgggctgcgtcgcgctgctggaaaaccctaccggcactgaggacccgaattacctcggcaacggcaatcgcctgttgctggacctgttcgacgccaaggtggaattggtcgagaacctcgacaatgtcgacgcccagctcaacgccctcgcagaccgcctgcgcagcaacggcaaaaaaccgtacctggtgccgattggtggctcgaacgcgctcggcgccctgggttacgtgcgcgccgggctggagctggccgggcaaattcaagacagcggcatccaatttgccgccgtggtgctggcctccggcagtgccgggacgcacagcggcctggcgttggccctgagtgaagtgctgccaaacttgccggtgatcggcgtgaccgtgtcgcgcaccgacgaagcccagcgtccgaaagtgcaaggtctggccgagcgcaccgccgagttgctgggcgtggacattcccgaggcgttcaaggtgatcctgtgggacgaatacttcggcccgcgctacggcgaaccgaacgccggcaccctttcagcggtcaagttgctggccagccaggaagggctgctgctggacccggtctacactggcaaggccatggccggtttgctggacggcatcgggcgccagcggtttgaagatgggccaatcattttcctgcacaccggcggcgcgcccgcgttgtttgcttacgactctgttctaacgggctgaacacggacccaatgtgggagctggcttgcctgcgatggcggtgggtcagcaacacatctgctagctgatacaccgctatcgcaggcaagccagctcccacatgaaacacaccagatattcctaaatagaatatcaaattaattttatattattttcaagtcttaaaaactggctttatagtcgcgccgtaggcgaagacgcgctacgcgctttaaggcaggatacgactactgcgtcacctgcttcgctcaacataaaaaacacaggggctcttcatgactatttctgtattgcgtcgcacgttgttggttggcactttgggcttggcgctcggcgcgagcctgatgggccaggcaatcgccggcgagcagctgggcaacatcaaaaaggccggcgaaatcaaaatcggcctggaaggcacctacccgccgttcagcttcgtcgatgaaagcggcaagctcagcggtttcgaagtggagctgtccgaagcgctggccaaagagctgggggtgaaggtcaagctgcaagcgaccccatgggatggcatcctcgcagccctggaatccaagcgtctggacgcggtggtcaaccaggtcaccatctccgaagagcgcaagaagaagtatgacttctccacgccgtacaccgtttccggtatccaggcgctggtgttgaagaagaacgtcgacagcatcaagacggccaacgacctggccggcaagaaagtcggcgtaggcctgggcaccaactacgaacaatggctcaaagacaaccagcctaaagcgatcatcaagacctacaacgatgacccgaccaagttccaggacctgcgcatcggccgtatcgacgccatcctgatcgaccgcctggccgcactggaatatgccaagaaagccccggacaccgcggctgccggtgatgccttctcccgtcaggaagccggtattgcgctgcgcaaaggcgagcctgaactgctcgacgccgtgaacaaggccctcgacaagctgcgcgccgatggcaccttgaaaaagctgtccgagaaatacttcaacgctgacgttactgaataatggaagcaggtttccaactcgcgctggactccgcgccctttctgctcaagggcgcgtattacacggtgattcttagcctcggcgggatgtttttcggcttgctgctgggcttcggcctggccttgatgcgcctctcgcgcttcaagctggcgagctggaccgcccgggtctacgtgtcgttctttcgcggcacgcccttgctggtgcagctgtttttgatctactacggcttgccacaagtgggcatcgagctggatccgattccggcggccctgatcggcttttcgctgaacatggccgcctacgcctgtgaaatcctgcgtgccgccatcagctccatcgaacgcggccaatgggaagcagcagccagtatcggcatgacccgcgcgcagaccctgcgccgggccatcctgccgcaggccatgcgcacggccttgccgccactgggcaacagctttatttcgctggtcaaagacacggcgctcgccgccaccatccaggtgcccgagctgttccgtcaggcccaactggtgtctgcgcggaccttcgaaatcttcaccatgtatctctccgccgccctgatctactggattttggcgagcatcctggcgcacttccaaaaccgcctggaagaccgggtcaaccggcatgacctggagtcttgaagcatgatcgtggttgaaaaactgaccaaacaattcaagggtcaggtggtactcaacggcatcgaccttgaggtcaaggaaggcgaagtcgttgccatcatcggccccagcggttccggcaagaccaccttgctgcgctgcctgaatttcctcgaagaacccaccagtggccgcatcaaggtcggtgacatcgagatcgacagcagcaagccgctcaaccagcagcaaggcctggtgcggcgcctgcgccagcatgtgggttttgtgtttcagaacttcaacctgttcccccaccgcaccgcgctggaaaacgtcatcgaaggcccgatcgtggtcaagaagatgccacgcgaggcggccaccgccctgggcctcaagctgttggcccgcgtgggcctgtcgggcaaggaagcggcttacccacggcggttgtcgggcggccagcaacagcgcgtggcgattgcccgtgcattggccatggagccggaagtgattctgttcgatgaacccacctcggcgctggacccggagctggtcggcgaagtgctggcgacgatccgcagcctggccgaagaaaaccgcaccatggtcatcgtcacccacgaaatgagctttgctcgtgatgtggctaaccgggtgattttcttcgacaagggtgtgattgtggaacaaggcgaagccaaggcgctgtttgccaacccgaaggaagaacggaccaagcaattcctgagcaagtttctggcccactgagctgcgcaatggccttgtgtgggagcgggcttgcccgcgatagcatcaccccggtttgcctgataaaccgaggcgcttgcatcgcaggcaagccagctcccaccgggttcgggtcctacagagaaacctcgtaccagcctgtaaaacacctcgctgcccttgtcaaaaaatacccccgccagtcagccccttctgaatatctgcgaacccgccgtttagccctttgcagccattgacgcttcacgaccaaccctcttatctagcgttcagaggattggatcctatcccggcaattcatcaaatcgttcctttcggcaccctgcgcacccgcgccacgggcgccggaacgattgctgctggctgcaccaaggagattacttatgacgcgcatgctcaccgccccgactttgccccaggccgttcgcaacggcatcaacgccctggccgccgcccacctgcaggtcgacatcgccccgtacaccggcatggatgagggtgatctgatcgagctgttctggaacaactgcttcgctgccgcacgacgggtaaccgcctgcaaggtcggcatgcctacgcatctacgagtccccgagagcttcgtgcaggacggcctggcccgggttcattaccaaatcatgcagatcggccacggccctgcgcgctcggcggtgacgaccgtgcgggtgaagacccacttcccgggcggccagccttcgaatctgtacgctgatgaaaaccagaaccttgccccggtcagcctgccagaaaccattcggcgctacggcgtcaacagaagccaggtgcggcgtggcattccgttgaccatcgagccctacctgaacatggctagcggtgacgccattaccctgcgctggggtgacgtgcgccttgacctgccaaaaatccagggcaaaagcgtaggcctgccgactcaagtgtgggtgccatcgtcggtgattatcgaagccggtgacgactgccgcctggaggtcacgtactgcattcttgatcgcgtgggcaataattcacgctgggcaccgccccgcaccctggccatcgccgcctgctcgccccaggcgcaagcccgcccagccagtgccctgtcgatctatcaaccgcgtcaccttggctccccctgtgagcctgggtgaaggcccttctatgcttattcccataagttagtttatttaaagatttaacacgcttagggtatatacaccggaccaccggacatctctgatttttctgtttttatttcattgaatgcaaggtcggtatggtcagaattaccccggtgcataacgccagggcattacgtgcagccaaggagcggcgctgatgtctaacttggctctaacacccccccagagtgaactggatgtagcccctctgctgttgccggccgccgtgctgcgcaatgacgcccaggcactggacgcagcccacacgctggcccaggctgcgcgcctgcaagccggcaaacgcgaccagcaacgcaagctgccgtgggctcagatcgagcaattcacccgcagcgggttgggcagcatttccattccccgcgaattcggcggcccagaggtttcgtttgtaaccctggccgaggttttcgcgatcatcagcgcggcagacccggctttgggccaaatcccgcaaaatcatttcggcatcctgcacctgttgcagggtgcggccaccgagcgccagaaaaagcagctgttccagagcgtcctcgatggctggcgcatcggcaacggcggcccggaacgtggcaccaaaaacacccttgaactgaaggcacgcatcaccgccgagggtgatggctatgtgatcagcggccagaagttctactccaccggcgcgctgtttgcgcactgggtggcggtaaaggcgctgaatgatgacggcaagcaagtcatggcgtttgtgcgccgtggcaccgaaggcctgcgcatcgtggatgactggtcgggcttcggccaacgcaccaccgccagcggtacagtgctgctggatcaagtgccggtggatgccgagctggtggtggaaaactggcgtatcggcgaaaccccgaatatccagggcgccgtctcgcaactgatccaggccgccattgacgccggtatcgctcgcggtgcgctcgacgacaccatcaccttcgtgcgtgaacgctcgcgcccgtggatcgacgccaaggtcgaacgcgccagcgatgacctgtatgtgatcgccgatatcggcaagttgaagatcgagttgcacgccgccgaagccttgttgcgcaaggccggccaggtgctggatcaggtcaacgcagcgccgatcaccgcgcaatctgctgcccgggcgtcgatcgccgtggccgaggcgaaagtgctgaccaccgaagtgtcgctgctggtcagcgaaaagctcttcgagctggccggtagccgcgcaaccctcgccgaattcaacctcgaccgccactggcgcaacgcccgcgtgcatacgctgcatgacccggtgcgctggaagtatcacgccattggcgcctatcgcttgaacggcactttgccggctcgtcactcctggatttgaccgaccagacctctggagaaatacgcatgaccctttctcatcacgtcgcggtcataaccagcgacgaacaagcccttattgtcgccagcgacctggccgaagacttccgccgcgacagcgcccagcgcgaccgcgaacgccgcctgcccttgcccgagctggatgtgttctcacgctccggcctgtggggcatcagcgtgccgaaggaatacggcggcgctggcgtgtccaacgtcaccctggccaaggtgatcgcgttgatcgcccaggcggatgcttcgctcggccaaatcccgcaaaaccatttctatgcgctggaagtgctgcgcgtgaacggcagcccggcccagcagcaacgcctgtacgccgaagtcctcgccggccagcggttcggcaatgccctggcggaactgggcaccaagaccgcccacgaccgcgtgaccgccctcacccgcgacggcgacggttttcgtatcagcggccgcaagttctactccaccggcgcgatctatgcgcagcgcatccccacctcggtggtggatgaacacggcgtgcagcaactggccttcgtgccgcgcgacagcgaaggcctgagcgtgatcgacgactggagcggcttcggccagcgcaccaccggcagtggttcggtagtgttcgacaacgtatgggttgccgcacaagacgtgatcccgttccagagcgccttcgaacgcccgaccaccgtcggcccgctggcacagattctccacgccgccatcgacaccggcattgcccgcgccgcttttgaagatgcgctgcactttgtgcgcaccaaaacccgcccgtggatcgattccggcaacgacaaggccactgaagacccgttgaccctgaaaagcttcggccacctgagcatccgcctgcacgccgccgaggcgctgctggaacgctcgggtgaatacctcgaccgcgcccaggccgacagcactgccgaaaccgtcgctgccgcttcaatcgccgtcgcggaagtgcgcgccctgagcaccgagatttccctggccgccggcagcaccttgttcgaactggccggcagccaggcgaccctggccgagcatggcctggaccgccactggcgcaacgcccgcgtgcatacgctgcatgacccggtgcgctggaagtaccacgccgtgggcaattactacctcaacgatgaaaacccgccactgcgggggactatctgatggcgaagaaaaagattctgctcaatgccttcaacatgaactgcatcgggcatatcaaccacggcttgtggacccacccacgggacaactcgacccagtacaaaaccgtcgagtactggaccgagctggcgcaaaccctggagcgcgggctgtttgacgggctgttcatcgccgacattgtcggcgtgtacgacgtctatcaaaacgccatcgacgtgccgttgaaagagtcgatccagttgccggtcaacgacccgctgctgctggtttcggccatggctgccgtgaccaaaaacctcggcttcggcctcaccgccaaccttacctatgagccgccgtatctgttcgcccggcgcatgtccaccctcgaccacctgagccgtggccgagtgggctggaacatcgtcaccggctacctcgacagcgccgccaaggccatgggcctgaccgagcaggtggagcacgaccgacgctacgaccaggccgacgagtacctggaggtgctctacaaactctgggaaggcagctgggaagacgacgcggtgctcaatgacccgcaggcgcgggtgtatgcgcagccgggcaaagtgcacaaggtcgagcacagcggcgagttctatcaggtggagggttatcacctgtgcgagccgtcaccacaacgtacaccggtgctgttccaggccggcagttcggaccggggtttgttgttcgccgggcggcatgccgagtgcgtattcatcagcgggcaaaacaaggcggcgaccaaaatccaggtggacaaggtgcgcgccagcgcggtggcagccgggcgcaacccgcaggacatcaaggtgttcatgggccttaatgtgatcgtcggcgccactgaagagctggcctgggccaagcacgccgagtacctcagctacgccagcccggaggcgggtgtggcgcatttttcagcgtccacggcgattgattttgcccagtacgaactggacgaaccgatccagtacgtgaagagcaacgcgatccagtcggctaccaagaacctgcagaacaacgactggacccgacgcaaattgcttgaacagcacgcgctggggggccgctacatcaccctggtcggctcgcctgagcaggtggcggatgagctggaatcctggatcagcgaaacggggctggatggcttcaacctgacgcgcattgtcacgccggaaagctatgtggattttattgatctggtagtgccggagttgcagaagcgggggtcgtacaagaccgcttatgagcagggaacgctgagagaaaaagtcttccacgctggcgctcgccttcccgaacaacacaccggatcaacctaccgacactgatcaaaactgtgggagctggcttgcctgcgatagcggtgggtcagcaaaaacacctgtacctgaccgaccgctatcgcaggcaagccagctcccacagttgaccgcattgttcttaccaacaccttatgactggaaattactgatgaaaaaaatactgctcacccacccagtcaaagcactggccctggctttcggcttattcagctcggcggtgttcgccgccgatgccccgttgaaaatcggcaccaccgccgcattcgccattccgctggaagccgctgtggccgaggccgacaagcagggcctcaaggtccagttggtggaattcaccgactggatcgcccccaacgtcagcctggctgccggcgacattgacgtgaactacttccagcacatccctttcctggaaaacgctaaggccgccgccgggtttgacctggtgccgtacgcgccgggcatcatcaacaacgtcggactgtactccaagaaatacaaaaccatcaacgacctgccccaaggcgccagcgtggcgattgccaacgacccgatcaacagcggccgtggcctgcaattgctggccaaggcgggcttgatcaccctcaaaccgggcgtgggctacaaggccaccgaagaagacatcgtcagcaacccgaagaagatcaagatcctgcaagtagaagccgtgcaactggtgcgcgcctatgacgacgccgacctggtgcagggctacccggcgtatatccgcctgtccaagaccttcgatgccgaatccgcgctgctgttcgacggcctcgaccacccggaatacgtgatccagtttgtgattcaaccgaagagcaaaaccgacccgcgcgtgatcaagttcgtcgacatctaccagcattcgcccgtggtgcgtgcggcgctggataagtcccttggcaagctctaccaagtcggctgggaagataaaaaatgaccgccgcgaatgcccaactgcgcgacctgggcttgccgctcagggacgccgagcagaccgagctgcaccctgacttgaaccgcgcccacgtgcgctttatcaacctgggcaagacctacgacggcaacgtgcacgccttgcaaggcattgacctggcgatccagcgcggtgaagtgttcggcatcatcggccgcagcggcgcgggtaaatcctcgctgatccgcaccatcaaccgcctggagcaaccgagcagcgggcgcgtgctgattgatcaggtcgacatcggcggtttcgacgaagaccgcctggtggcgctgcgccgccgcatcggcatgatcttccagcacttcaatttgatgtcggccaagaccgtgtggcagaacgtcgaattgccgctcaaagtcgctggtgtgcccaagccacaacgcgagcaaaaggtgcgcgaactgttggagctggtgggtttgcaggacaagcacaaggcttacccggcgcaactgtccggtgggcagaaacagcgcgtgggcatcgcccgttcgctggtgcacgaccccgagattctgctgtgcgacgaggccacctcggccctcgacccggagaccacgcaatcgatcctcggcctgctgcgcgagatcaataaacgcctgggcctgaccatcgtgttgatcacccatgaaatggcggtgatccgcgaaatctgcgaccgcgtggtggtgctggaacacgggcgcatcgtcgaacaaggcccggtgtggcaggtgtttggcaacccgcagcacgaggtcagcaaaaccctgttggcgcctctgcagcatggtttgccggaagaattgcaacgccgtttacagcccctcccggcatcggcggaagcggcggtcgtgctgcgtttgcagtttaccggcagcgataccgacgagccggacctggccgcactgttcagcgcccttggcggccgcgtgcgcttgctgcaaggcggggtggagcggattcaggggcatgccctggggcaactgctgctggcggtcaatggctcgcctcacgacgccgaagacctgtgcaagcgcgccacgcgctgggcatacaacgtggaggtgctgggctatgtggtttgatcgtttgttgcagggcgccatcgacacgctgctgatggtgggcgtgtcgtcgttgatcgcgctgctggtggggattccgctggcggtgtttctggttacgagcgacaagggcgggatctaccaggcaccggcgctgaaccgcgtgctgggcgctttcgtgaacctgttccgctccattccattcctgatcctgatggtggcgctgatcccgttcacccggctgatcgtcggcaccacttatggcgtgtgggcagcggtggtgccgttgaccatcgccgccacgccgttctttgcgcgcatcgccgaagtgagcctgcgcgaggtcgaccacggcctgatcgaagccgcccaggccatgggctgccgccgctggcacatcatctggcacgtactgctgccggaagcgctgccggggattgtcggcgggttcaccatcaccctggtgaccatgatcaactcgtcggccatggctggggcgattggcgcgggcggccttggggatatcgcctaccgctacggctatcaacgctttgatacgcagatcatgctgaccgtgatcgtgctgctggtggtgctggtggcggtgattcagctgggtggtgaccggttggcgcgggtactcaacaagcggtgaggtatagtcgggccatcgaacaagcctggtagtacccgccatgaccctcaagcccgacgacctcaaccaaatcacctccaccaccctcggccactacaacaaggtggccgaggattttcgcgaaggcacccgcgatcacgatgtgagccagaacatcgacgccctgctgcggcatatccagggttcagcgccgtttaccgtgctggatttcggttgcgggccggggcgggatttgcagacgtttacgcgtatgggccacgtcgcggttgggctcgacggctccgagcgatttgcgcagatggcgcgcgaagacagtggctgtgaggtgttgcagcaggattttttgaagctggagttgcccgccgagcgctttgacggggtgtttgccaatgccgtgctgtttcatatccccaagcaggagttgccgcgtgtgctcaagcaattgcatggggcgttgaagccgggtggggtgttgttcagttccaatccccggggggaaaaccaggaaggctggaatgggccaaggtatgggtcttatcacgatctggcggcgtggcaggcactgttgagcgaggccgggtttgtggagctggagcattactaccggcctgctgggttgccgcgggagcagcagccttggttggcgagtgtgtggcgcaagctgtagaactgtattgcctgaaccggcctcatcgcaggcaagccagctcccacagggaaatgcattccaagtgtgggagctggcttgcctgcgattgcggcctgcgcggcgctactgaccgacctgatagaccacaggtttttgccccaccaccaacgccgtcacactgtgcccggcgtatcccgctttttccccggcggcaaaattcgccaccaaccgtgtgccgtcggcaaacgtggtctcctgcacctgccgatccgtcgtcaaccaacgaaacccggtcatttcctgagccgccaggcgctgatgcagcggccggaaaaacaggtcctggcgctggatcatcggcagccgttgtttaaccgtcgcagcgctgaggtggtacaacggcggcacgttatagagcaattgggtcaactcgttttcaacctgcacattgctcaatttgaggctgtcgaacagccagtgatgggtggtgatcactgagccgtggaacacggcctgatacagtggcaaacgcatggccgggtcaaaatacaccgttcgaaagggttctttcagcggcacggatttgaagaataccgccggctgctccggtgggaaccagttgccgacgtaatacggcgactgcttgtcctttgtcatctcccgatccccccaccccagcaccggcgtctgcatgccgtgggcgaacagaatgccccgggcagtaatcgcattgccgtcttcggaaccggccggcagcttgagcgcagtattcaaccagcgtgatgcgtcgatattgccctcggcgttttgcgcctgggtcatgggcgcgccgtcgcggtagctgtcaaagaccatggcggtggcgtaggcatcgaggaaccaggcgttgaaaccagccttggcctgcaccgctttcacccgcgcttccagcaaaggccgtacgcagcgagggtcggtgtaatggccggacctctggaagccggttttcagcttgccatccttgagcacgatggcgcagttgcggtaggcgttgctgcccaagtgggcggtggtccaatccgggttttccgtggcggataacgccgtttcataggaatcgtagggcgccatcagataaccggcgtcgacaccggtgcggatcgcttccggatgccagaggccaccttcccagccttcgcccaaggtcaccagcaagcgttggagcccagcggctttcagggatgcaatgaccttgttgccccagttttcaggggtgtcgctcagggcgccggcaaaggtcaaagccagttcaccccgcaactcgccataacgggccgcaagccgtgctgcgtcgggctcctcaacctgccacgcctgccgggcctgcttgttgatggccgcattgaggccgcgcagcagcacggtctgttcataacgattgagcacagaggtctgtttcaggacctgcgtggactccttgtccagcagccccttgagttcattggcgcgcagcaacgtcaccagcctggaccagtcccgcacatcctccagcgccagcaagtcattgccccatagataaacgtggctggcccccagcaatttctcagcctctggtgtctgccgcagcttgtccgacaagggttcataacgcccctggtccaccagccattggcgataacgtttggcgcccgccaaagggtcggcactgcccaggtgcaggcgcagcgtcatgggtgcagaggggtcgagacgggtgaagtcgtgagccacggacagcgccagccccccgccttcggcttgccactgcaagcgattgttgtaggggttggtcagcaaccagttcaacgtgaaaccgccatgatccacgccccacagcggcaggctgaggtcctgcgtggtgttgagttcgccctgttccagcaagaacgccttccacaccgggttgtcagcgggtacgtaatgcccctcggccaagggccagatcacgcctttgcccatggcctcggcgggttgacgcaacagcggcaactcgcccggctcgcgtgcggtgatggtgagggacaggtcgcgctgctcaaggcgcgcggtcaggcgataggcacctttatcccattgccacgcagcctgttcggcgctggcttgcagatcgctgacggcatgtggggtgacgccactggaggcctgcaccggggcttcgccgctgggcgtgacgcgcagggccagcgtggcggggtccagttcgacgcgccacagggggttttccagcacggcggctgaggtgatcgggcagaggaataaactgcaaaccagcaaaacgtgacgcaggaagttcatggggttcgacctgtgtgcaaggggggtcgagggtaaagcacttgatgacctgaggggagcacactgggcatttagggaagttccatacatcgccttggccttgtggagatccaaatgtgggagcgggcttgctcgcgaatgcggtgtatcagtcacacatgcaccgactgacacgacgctttcgcgagcaagcccgctcccacattttttaaccgtgtttttcctgatgctcctgcttcggctcgcgaatcttgtaccaggccacgtacagcgcgggcaggaacagcagcgtcagcaaggtcgcgatgatgatcccgccgatcatcgcgtacgccatcggcccccagaacacttcccgggcaatcgggatcatgcccaggctggcggctgccgccgtgagcaggatcggccggcgccggtgctcggtggcttccaccaccgcatcccacggcgtatagcccgccacttcgtactcatgaatctgcgtcaccagaatcaccgagttgcggatgatgatgccgatcagcgccagaatccccaggatcgccacaaagcccatcggcgtgcccgtgggaatcagcgccagcaccacaccaatcaaccccagcggggcgacactggccaccaggaacatcttctgcacgctgtgcaactgaatcatcaggaaggtcgccatcaggaacagcatcagcggcaccactttggcaatcggcccctgggccttgccgctctcctccacggtgccgccagtggcgaccttgtagcccaccggcaagccggcgctgaatttctcgatggtcggcgccagttgtttcaccaagtccgtaggctgcatttcatcgcgcaccgaggccttgatggtgatggtcggcttgcggtcgcgacgccacaccagcggctgctccagttcatagcgaaccgtggcgaaggccagcagcggaatcgaggtgccgttgggcgtgacgatctgcaggttttgcagggtttccggcgtaccccgctcggcgtcttcggcgcggccgaccacgttgatcaagtaaatgtcgtcgtgcacctgggtcaccgaggcgccgctgaccacgctgttcatcaactgcgctacgtcttcggacgacagccccagttgccgcgccttgtcctgggcgatgtccacgcgcagcactttgcccggctcgttccagtcgtagatgatctcgcccaggtgagtgttctggtccagcaaagtcgccagttcgatggcgtgcttgcgcacctggtcgatgtctttacccgacacgcgatactgaatcggacgccccaccggcgggcccatttccaaaggctgcacaaagctgccgatgccgacaaaatcatcccgcaggcgtttttgcaggcgcgcaatcagtgcgccgcgctcttccaggcctttgctgacgatcaccaactgcgcgtaatacgggttttccagttgctggtcgaggggcaggtagaaacggatcgccccctggccgatataagtgctccagcgcgcgatgtccgggtcatccttgatgatcgcttcgaggcggtcgacggccttgcgcgtctcgttgatcgaggcgttttgcggcaggttgaggtcgacgaggatttccgggcggtccgacgacgggaagaactggttctgcacaaactgcatggagaacaccgacgccacaaacagcgccacggttataccaatcgcccaccagcggttgcgcatggcccacaacatgccgccattgaaggcgcggccaatgcgcccgggctcgccaccgtggggcttcacgttggcgctgaggatatgcacgccgatcaccggcgcaaacagcaccgccacgacccacgacaccagcatcgccacggcgatgaccgcgaacagcgtgaaggtgtattcacctgccgaactggcgttgaggccaatcggcacgaagcccgccacggtcaccagggtgccggtgagcatcgggaacgccgtcgaggtataggcgtaggtcgccgcctgctctttggtttcgcccttttccaggcgcgtgatcatcatctccaccgtgatcatcgcgtcgtccaccaacaacccaagggcgatgatcaaggcgcccagtgacacgcgctgcatggtgatgccgctgtactccatgaacacaaacaccagcgccaacaccagcgggatcgagcatgccacgaccaatcccgcgcgcatgccgaggctgataaagctcaccaccagcacgatgatcaccgcctcaaatagcgcgctggtgaagccgccgacagcctcttccaccacttctgcctgatcggacaccttgtgcacgccaacgcctacgggcagttcggcagtcagctcgtccatacgcgtatgcagggccttgccgaaggactggatattgccgcccttctgcatggcaatcgccaaaccaatcgccggtttgccgttgaagcggaacatgggccgcgccgggtcaacgtagccacggctgatgtcggcaatgtccgccaaccgatagaaccggtcattgaggcgcaagttgacgtctgccaggtctttctcggaagcgaactgccccgaggtgcgcaccgaaatccgctccggcccggcctcgatcaccccggccggcgtcaccgcattctgcgattgaaggctttgcacgacctggcgctgatcaatccccaatgccgccaatttgcgcgtggagaaattcaggtaaatcacttcatcctgctggccgatcatctcgaccttgcccaggcccggcaccgaacggatttcggcgcgcacctgttctacgtagtcgcgcagttgacgcatcgacaggccgtcgccggtaaaggcgtagaccgagccgaacacgtcaccgaattcatcgttgaacgacggcccctgcaatccctgggggaaggtaccgcgaatatcgtcgatcttcttgcgcacctggtaccagatttccgggatgtccttggcaccggtggtgtccttgaggaacacaaacaccgtggactcacccgggcgggtgtagctcttcacataatcgagggagtccagctcttcgagttttttctcgatgcggtcggtgacctgcttgagggtttcctcctgggtcgcgcccggccagcgggtctggatcaccatggtcttgatggtgaacgaaggatcttcctcgcgacccaggttcatgtacgaaaacacgcccatcagcagcgcgacgaacatcaggtaccagacgaaggactgatgcttgagggcccagtcggataagttgaagctccctttcatcgcgggctgtcctcgtcgattttgactttttgcccgggtttcaggctgttcaccccagcggtgacgatgcgctcgccgggtttgacgccgccattgagcaaggcgctgtcggcgtcacggctgatcacgctgacatcacgcggttgcacggtctggctttgggtgtcgaggatccagatgcgggttttgccatcggcttcctgcaacgcggtcagcggcaattcgatgcgcggcgcgatggcgctgctcaacgtcacgctgatcgccgtgccgaggcggaatgctggaggtgtctcggccagggtcaggcgggcacggcgggtacgtgtggcgctttgggcttgaggttcgatttcacgcacgatggccgtggtattgacgctggggtcgagttgcccggcgaccagaaacaccacatccggcggcaggcgttcggcgaggccggcgggcaggtcgatcaccgcttccttgatgtccgggcgcgccagggtcaccacttgttgcccggcgctgaccacctggccggcctcggcattccaggcggtgacgatgcccgcgtggtccgtgcgcagttcggcgtagttgagttggtctttggcctggttgaccgacgctttggcctgatcgagtgtggcttgggtggttttcaggtcggtctgggcaatgtccaactgagcctgggcacccacgccacggttgaacagctcctgctgacggcgggcgttggcctgggcattgatgaactgcgcctgcacgcgggcaagatcaccttgggctgaacgcagctggttttgctggtcggtcggatcgaggaccgcgagcaacgcgcccttctcgacttccgcgcccacgtccaccgcgcggcgggcgatgcggccaggcacacggaagcccagattgctttcgtagcgggcctgaatggtgccggcgaagcggccgaggttttcctggtcttcggacttcacttccatcgacagcaccgggcgcacgggctccggtggcgtctcttccttggagcatgcggccagcaacaggctggcggccagtaatgccgtcaggcgcttcatggctgggctcctctgtcggcgatttcgacaatcatccccgggtgcagcaattgcccaccggccaccacgactttttcgccgcctttgaggccgtcgccgatgatcactttgccagtcaggtagcgcgccacggtgaccttgtgcaattgcgccttgccgtcgccgtcgatcagccacacggcgggttcgttcaggtctttggtcagcgccgcccatggcagctcgatactcgccttggccgggccattggcggtggcgctgaccaccgagcccagctccatgcctctgggcaggctttgcagggcgattttgacctggacagtaccggtattggcggcgacggccggggtcacttcgcggaccttgcccacggccttgatgcttgggttatccaacaggctcacggtgatcggcgcatccggcggcggctcgaccagcagtgattcatagacgttgaacactgcatcgcgctcaccatcgcgggccaggctgaaaatcggcaccgtggcttgtacgacctggccgacttcggcctgtcgcgcggtaataatccccggtgcgtcggcaatcagcgaggtgtagccgagttgttcgcgggcgttggccaattgggcctgggcggcggccaacgcgctttggctgctgcgcaaggcggcctgggcggaatcgtactcgctgcggctggtgtagcccttgggcagcagcttttcctgacgcacaaaggctgcggcggtttgcttgacccgcgcctgctcagccacgacctgggcctgggcggagtcgacgttggtctgcaagtccttggggtcaagcttggccagcacttgtttggcgctgacgcggtcgcccacatcgaccatgcgctggatgatcttgccgcccacgcggaaggacaggtcggtttgtacgcgggcttgaatatcgcccgtcagcgtgacggctgcggcaaaatccgccgactgcacggtctgcacaaacacgcgcgaatgttccttgggctcggcctttttctcaccacagccgcttagcagcgtcagtaggccgattccgatgataagtgtaaaagtacgaccgcccatgcaggctccttttgcgtgatgccgacgtgccagtgtctatgcgactgtgagcttagatcagggttccacgttatagggggcaagtggtaaagactaaagatatttccgacgctcaccccggttccggcgcaggtagtatgcaaccctccttccaatcgcgacgactcccatgctcaaaaccctcgcggtggccaattaccgctcgatcaacaaattggtggtgccgctggaccggttgaacctcgtcacgggccccaatggcagtggcaagtccaacttgtaccgggcgctgcgcctgctggccgaaaccgcccaaggcggggtgatcaacgcgctggcccgtgagggcgggctggactcgacgttctgggccgggccggagaccatcacccggcgcatgcgcaatggcgaggtgccgattgagtccagtgtgcgccaaggcgtcaaacgcttgcgcctggggtttgccggggaagatttcagttacgccatctccctcgggttgcccgaacccagccagtcgttcttctccctggacccggaggtaaaaaaggaatgcatctgggccggccatacctaccgcccggccagcctcctggtgcagcgctccggcccgatggtgcgcgcccgcgaaggccgcgcctgggacgtgctcgcccagcacacgccgaattacaacagcctgttcgatcaggtcggcagcctgcgcggctcgccggaagtcctgttgctgcgtgaaagcattcgcggctggcgcttttatgatcactttcgcagcgacgtggacgcgccggtgcgccagccacaactgggtactcgcacgccggtgttgcatcacgacgggcgggatctggcggcagcgttacaaaccatccgtgaaatcggcgaccccgaggcgttgcagcgggcggtgagcgatgcgttccccggcgcacggctgaacatccaaccgttgcagggcgggcgctttgcagttgagttttttcaggaaggcttgctgcggccgctgtcggcggcggagttatcggacggcaccttgcgttacctgctgctcatcgcagcgctgctgacgccaaggccgccgaccatgatggtgctgaacgaaccggaaaccagcctgcacccggacttgctgccggcgttggcgcgcttgattatccaggcgtccatgcattgccaggtgtgggtggtgtcccatgcgagccggttgattgcggcgctggagcaggatgaagggtgtaattcgattgtgttggagaaggtgatgggcgagacccaaatcgtcgggcaggggattctggatgcgccggcgtggcattggccggaataggtggtgcctgagccggcctcatcgcgggcaagcccgctcccacatttggaatgcattcccctgtgggagctggcttgcctgcgatagctatctcagccctgccacttcccgccttcaacaatcacgctttcaggcttggtgtcatcgctcagctctttacgcacgtactggtcatacagcttgagcaggaatttctcctcacccaatttcgccaactcggcattcacccagtcacgcagctcgatgttgcccttcttcactgcaggcgcaatcggcgcttcatcgccgagtttctcttccagcacacggtagcccgggttttgcttggcccagctgaacaacaccaggttgtcttgcgcgtaggcatcaccacggccagccgacagcgcttgcagcgactcggagtttttctcgaacttgagcagtttccagtccgggtggttcttggtcagccaaatgtcggccgtggtgccggtggtgacgatggtggtgcgggtggccaggtcatccaggtttttcaccgcgctgccgttcggtactagggcctgcaccgcaactttgaggttggggttggtgaagtccaccgcttccttgcgctcaggcgtcacggtcatgttggcgaggatcaggtcgaccttgtcgctttgcaggaatggaatacggctcgcgggttcaaccgcaacgaactcgactttgttttcatcgcccagcaaatccttggcgaattggcggccgatgtcggtatcaaaccccacgtagcggcccgcttcgttcacaaagccgaacggcggtttgtcggtgaacacgccgacgatcaacttgtcgcgcgccttgatcttgtcgatgtaactcgcggcagcggcgacaggtttggcaggctcttcggcctttttatcgcagccggccagcaaggcgacggcaaacagtggcagcagtaactttttcatagcaactccagttccttggttttcttgggcagtgttgaaacaaaggagaacttctccaggaactgctgcgcgcgtgcggtttgcgggttcgtaaagaatgcctcgggggtgttctgttcgaggatgcgaccggcctccataaacaccacgcggtcagcgacggcgcgggcgaaggccatttcatgggtaacgatcagcaaggtcatgccatcgcgggccaggccctggatcacctccagcacttccttgaccatttccgggtcgagcgcggcggtgacttcatcaaacagcatgacctgagggttcatgcacagcgaacggacgatggcgatgcgctgctgctggccgcccgagagctgacgcgggaaggcgtcacgcttgtcggccaggcctacgcgctcaagcaatttctcggcctgggcgcgggcttcacggggctcgcgtttttgcactttcagcgggccgagcaggaggttgtcgagcacgctcatgtgcgggaacaggtggtagctctggaacaccatgcccacgtcctggcgcacctggcgccaatcggtttttttatccagcagctcgttaccggcaaagcgcaggctgccgctgtgggcgacttccaacccgttcaggcagcgcagcaaggtgcttttgccgcagccgctggggccgaggatcaccaccacttcgccgctttgcacgctcaggtcgatgcccttgagcacctgcgcttcgccaaagtacttgttgaaatccttaaactcgatcaatgcgctcatgcttgggcccagcgccgttccagcaccttggaggcggccgacaacgggtagcagataaagaagaaaaacaggaacagcacgccgtagatcagaaccgattcataggtgcgttcgataatttgctggccgaccttgatcacgtccaccacgccgatcagcacggcgagcgaactggtcttgatgatgcgcgtgtagacgttgatggttggcggggtcatgcgtttcagcgcctgaggcagcaatacgtagccgtagagttgcgggtcggataagccgatcgacaagcctgcctcacgctggccacggggcagcgaatgcaacgcgccacgcaccacttcgcccacctcactggcgccccacaacgacagcaccagcactgcgcaccagaagctcggaatgctcaggccgaagaaaatcggcaggccaaaaaacagcaggtacagccacaccagcaccgggatcgcccggaacaactccaggtaaatccgcaataccgcgttgatcagccggttgttcaaggtgcgcagcaccccataaagcacgccgccgacggtgctgaaggcgatgctcagaaacgaaatcgacagggtttgcgcggcgcccttgcccaattgcggcaacgacacccacaacaactcaagacccgaactggccatgctggagcctcctttccaggcggctgagcaacagcgacagcggcaaaaacagcaacacgcaaatcagcgtcagcacggcgagcatttcgtaggttttgtagtacagcgcgatgtagctcttggtggtgtagagaatctccggcaccgccacggcagacaccacggtggtctccttgagcaggaagatgaagttggcgaacagcgcgggcaggctgaggatgccggcctggggcaggatcacgtggcgcagcaactgccagtccgacaggccaatggacttgcccgactcgatctgcgccagcggcaccgcttccacacccgcacgcagcacttcggtgaggtaagcgccgccaaggaaagtcatggtgatgatcgccgcccagaacccggaaatattgaaacccagggccggcagcgcgaagtagacgaaaaacagttggatcagcagcggcgtgttgcgcgccagttccacatacagcgccaccaggcgtgacaggtaagacgtgcgaaacaccagcaacgcggcgttgatcagcgccaccagcaacgaggtggcaatggcgatcaggcccacttgcagcgtcacccccacggctttgagaaacgccggcaaggtgctgaggataaatgcgaaatcgaaggtcatttgcagtccatgacgccgcaagggtaatgcagcgagcgcagttcaatccgccgtgggtaacggcgggtagcgcgaactttaaaggtataaaaaataaaatttaaatacccaaatagcatattgatatcatccaaaaagataacccccggattcgcgggtttgacaggtgacggctatggtctgtgggtcgaaagattcgagggactgagcaatgaacgaagtaaaaccgatggatccgcaggagctggtgaagtggttgatggcgttgcgccgggcgatcgatagccgatctatctgacacgccgccgtccaatgtgggagctggcttgcctgcgattgcggtctttcagtgacagatgggctggctgacactccgctatcgcaggcaagccagctcccacatttttttgattgtgttccaagctgccataaaaaaacgccgacgctataacagccgtcggcgttcaaaccttgaagggggtttggtttacatcagaacgcaggcacgaccgcgccgttgtacttcttctcgatgaaggctttgacttccgggctggtcagcgctttggccagtttctggatcgcgtcgctgtccttgttgtccgggcgggccaccaggaagttcacgtacggcgacttcgcgtcctcgatgatcagcgcgtctttggccgggttcaggcccgcttccagcgcgtagttggtgttgatcaggtccaggtcaacctggtccagcacgcgcggcagcagagcggattccagctctttgaatttcagatttttcgggttgctggcgatgtcttttggtgtggccagggcattggttggatctttcagggtgatcacaccggctttctgcagcagcaacagggcgcggccgctgttggagccttcgttcgggatggccacggtggcgccatctttgagctcggagatgttcttgatctttttcgagtagccgccgaagggttcaacgtgcacgcccaccacggtgaccaggttggtgcccttgcccttgttgaagttttccaggtacggcagggtctggaagtagttggcgtccaggcgcttctcggccacctgcacgtttggctgcacgtagtcggtgaagactttgatttccaggtccacgccttctttggccagggtcggtttgaccagctcaaggatctcggcgtgcgggatcggggtggcggcaaccaccagtttctcgttggcctgggcgaagctagcagtcagggcagccgccagtgcggtaaacaacagaacctttttcatgcagtgtccttatcgaaattccggggcgtctctgacgaccgttttttgtggtgtgccagcgaagtgctatcgcggcgtggaacggacaatacctagattttttattcccgaacaatatcttttattcacgttgatattccattttgctcatacaggaattgacgcagcacttcctgctcagcggaactggcccgttggaaaatctgccgcacctgctccagcggcgaacccaccgccggcaggttcaaatgctcgggcaaaatctcgtcgccactgctgaccagcaacgcaaaatgaatgacgttttccagctcgcgggtgttgcccggccagctgtggtgttccagcacgtgctgggcagcatcgctgatcagcggcaccggcaggtccaggcgctggctgtagatgccgaggaaatattcggccagggataaaatatcgcccacccgctcgcgcagcgccggcaaatccagctggccttcgctcaggtaatgaaacaagcgctcattgaacttgcccgcagcgacggcctgggccagatcaatgctggtagccgccaccagccgcacatccaccgggctcggctgatgggcaccgacacgggtgacttcgtgattctccagcgcagcgagcaacttgacctggatcggcaacggcaagtcgccgatctcgtccaggtacagggtgccgccattggccgagccaaaccagcccgcccggctgctggccgcgccactgtgagcgcccgcggcgtagccgaacaactcggcatcggcgtaggtcgggctgatggcgccgcaattgaccgacacaaacaaaccggtgcggtcactgccacggtggatgtgccgcgccagcagctctttgccgctgccggtttcgccgcgaatcaacacgggcaaggcgcgtggcgcgaggctctccaaatcttcacgcaactggcgcgagcgtgggtcgacgaacaccagggctttggcgcggatgctcagcgggcttttgtcggcgtcgggaaaggtcagcaaaggctggccgtaggtttcatgcaggctcatggcaggctcccgcccccaatccacttcagggacggggcgttgaaaaaatgtcaggcactacgccgggcgtggtgctcaaggcggttttgcaggcgataaagataggcaaaaccctgctcccagcgctggtggccggacttcacattgatatggccggcaccggacagaatcccggcttcggcgccccagttgcgcgccagttccagcgcccgaggggcactgacggcgctgtcgttgtcggagctgaccacctggctcggaaacggcaacaggtgggtcggaatgggggcgaaattgcgcaaggcgggagcacaggccgggcgttccacatcggccggggccaccagcaaggcgccgcgcacctgccgcagaaactgcaccggcgccgtcgcggcccagtgggcgacagtgatgcaacccaggctgtgagcgatcaggatgaccggcgtgctgtccgccgcgatggcctcggccagcgccgccacccagtcttcgcggcgcggcgtcagccagtcggcctgctccacccgcgcactgttgggcaggctgttctgccaatggctttgccaatgatcttctggcgatccttgccagcccggcacgatcaggtaacgaatcgactcgctgtgcatgggtgtgccctcctgcagcgtttaacgttgctgaccagtatagggacggggtttatattcgttaaggaataagaagctatttattaataaccaaaaactcaaatcaaacaaaggtcaaactgtgggagctggcttgcctgcgatagcggtgtgtcagccagcctatctgtatctggaagaccgctatcgcaggcaagccagctcccacagggttttaggttgagactcaaatcgcaggcaaaaaaaaggccgcaccctgccaaggagacggccaaaaaattgtcgaggcttttgcagcttaacgagcggtaatcaccgacagtttggtgatgcccgcgcgttcgatagacgccatggctcgcgccacttcgccgtagttcacaccatcgtcagcctgcagttgcacccgcacatcggggtccttggccttggccgcctgcaggttgaattccagcagatccggctggatttcgtccttgttgataaacagtttgccggcgccgtcgatgctcaccaccagcgggtctttctgctccaccggggccacggcctgggtcttgggcaggttgatcggaatcgcattggtcaacagcggcgcggtgacgataaacaccaccagcagcaccagcatcacgtccaccaacggcgtgacgttgatctcgctcagcacctcatcactgtcttgcgtggagaaggccatctcaggacgcctccttcactttttgcgggttgccggcagcggccttgttcagcgctgggtgcagcagcacgcggaacgaatttttctgcgccaggctgtagaagtcgtgggcaaagtcgtccaggtcggcggccgtcagcttcaaacggcgcaggaagtagttgtagaccagcaccgctggcaccgcgacggcgatccccacgccagtggcaaccagtgcggcaccaatcggcccggccacggtttcaaggctggcggaaccggccgcgctgatgcccttcagcgcttccatgatcccccacacggtgccgaacaggccgataaacggcgaggtgctgccgatactcgcgaccacagccaagcccgtttccagcgagcggcgttcacgtacgatctgctgacgcagggcgcgctcgaggcggtcctggtgattgatcgcctggctcaaatcggccgcgtgcggtgcctcgccgacctggatggcggcataaccggccagggccacgcgggccgcagcgccgggctgggtttgggccagttctgccgctgagtccagactggacgcggcccaaaactgtttatggaatttgcgatcctgcgctttcaggcggccgaactgcacgcccttgagcagggcaaagccccaggtggcaaccgaaaagaccaccagcagccagatcaccgcgctttcgatggattcaagtggagatgctaatgccatgatgttttccctctgtgcaggtcgcggtgtgtccaacacaccgcagccgaatagttagtgaatcttgaaatcgatcggtacgctgacccagccgtcctgggccacttcgccctgcttggccggcacaaagctccaacgcttcacggcggctagtgcggcgtcgtcgagttgctggcgaccgctgctcttctggacctggatctcaccgggcttgccgctggccaacacatgcaccctgagcaacaccgtaccttcccaaccccggcgctgggccagtgacgggtattcgggcgccgggttcttcaagtacgcggcgttggccgaagccggtgtcaccggggccggcgacggcggagccggtggcgcgggcggtgccggtgtcggcggcgcaggcggttgctcaaccggtttcggcgcgggctttggctcaggttttggcactggcttcggcttgggttttggaatcggttttggcggcgctggtttggcagccaactcatccaccaccggcggcggtggctcgaccacgggcggcggtggtggcggcggcacgggcggtggcggttcaaccacgggcggcgccggctgggaaaattcgatggtcatcggtggaatttccggcggcacaacaggcagcaccggcgttggcttctggctcacccaatagatcaccgcaccgtgcagggccaagaccagcaaccccagcagaatcccttcgcggcgactcgaaaagcgtttcggggcttgctgcagacgctgctgccccaacggcgcgcggtgcggccggccaaggtcgaccaactcaccacccggtgcctggcgccactgcgcctcgtgtgcactggcggcggtctggacattgcccattgattcactcccctacggttttgaaacaaaaaaaccgacaggcctgcctgagaggccgtcgagggctgaatcatcggggccagacgcttatctcttaaagtaatctttgaagttatacatagatcaaaattgaataaacgaaacatccagaaacgtcaaagccacgagctgcgcgggctggcgcgcaggggatttttttcaatgcttttcaggcatgcaaaatattcagtaaaggcattgctcaaacagggctgtttgcacacaaatccagcaattggcgctgtaacgtttgcccggccgcgcccaggccactgcggccgtacaaggccaggcgcacgccttgcaccgctggcaaaccgctgtcgtcgcccaaaatcacatgcccggcctgcaccactcgtctgggcaacaaactgatacccagccccgccgccaccgccgagcacacgctggccaggctcgcgctggaatagccgatgcgccagcgccagccaccgacttccaggtgttgcagcatttcattgcggtacaaaccgcctaccggaaacgccaccaacggcagcgggtcgcgacccagcgacggcatgccaaggctgtcgacccagcacagcggttccggccaggaggccaggcagtcatcgctgtcgcccatctgcttgaccagcagcacgtcgaactcgccgccccggtattggcgttggagttctgggccgaggccgctggtgacttcgaggcgcacgcgcgggtgggcccccacaaatgccgacagcaagggcatcaggcgctcggcagcgaaatcctccggcacaccaaggcgcagcacaccttcgctttgctgattggtcagcacgtcggcggcctcttcgtgcagcgcgaggatgcgccgcgcatacgccaacaggcgctcaccctcagcggtggccactacgcggcgctgttcgcggtcgagcaactggcacgccacggcctcttccaggcgacggatctgctggctgacggtggattgagtcaagtgcaggcgctcggcggcgcgggtgaaattgccgcagtccaccacggccacaaaactgcgcaacaacacagggtcgaacatcggcatcaccattgcgtttgccactggttggcatggttatatttaatttcagaatacccgcgccgctgcccatactcaccccctcatttaccgacccgcacaggcgctgcatgacgctgaatcactctatcgccggcaaactcgccggctggggcctgctggtggtactcggcctcaacctgcggccgatcctcagttccatcagccccttgctcggcgagatccgccaagccaccggcttgagctttcaaagcagtgccctgctgaccagcctgccggtggtgtgcatgggcttggtcgcattgatcggtgtgcgcgtggaagcacgcttgggtgaacggcgcggcattgcgttgggtttgatgatgattctgctggcgtgcctggcgcgctggctgatgggccaggcctcggcgctgctggtcaccgcattgctcggcggtgcgggtgtggcgctgatccaggcgctggtgccggcgatgatcaagcgcgaattcaatcaccgcgtgccggtggctatgggtgtgtattccgcctcattgatggcgggcggcgggctcgctgccttgctcagcccgttggtggccactcacttccagcaatggcaggcaggcttgggcgtgtggctgctgccggcgctggccgcgctgctgctgtgggcatgtgtgccgctgggcgcggccaaaagcgccaagctgattcccgcgttcaaggggctgcgtaatcgtcgtgcctggctgttggcgctgtatttcggcctggtcaattgcggctatatgagcatggtggcgtggctgcctgcgtactatcagcaattgggttggggcgtactgcccagcggttcgctgctggcattcatgacgatcttccaggtgctcgccgcgctgttgatgccagtactggcacaacgcggcatcgaccgccgcccgctgctcggcatcagcctgttggcgcagaccgtgggctacctcggcctgatcatggcgccgctgcaattcccgcatctgtgggtcgccttgtgcggcttcggcctgggcgcgtgtttcgccctgagcctgctgctgaccctggaccaccaccgcgacccacgccaagccgggcaactggcggcgttcgtgcaaggcgtaggctttttgatcaatgcgctgtcgccatggctgaccggttggctgcgcgaactcaccggccacttcgtcagcgcctggtgggtgctgacggccacggcgttggcgatgctggtggtgacgcgggtgttcagcccggccacctaccgcacgccgtcagaagtcgtagcgaccggtcacgcctaaggtgcgcggcgtgcccaacaggccttcgtagccgccattgccgccggtccagagggtggtgtagtaggttttgtcgaaggcgtttttcagccacaaggacacgtcccactgaccttgctgatagttgccgcgcaggccggtggacaggttgaccaccgcatacgccggaatctgcccgtagtcggagtcttccaccgtgcccaccgccttggagcggaacgcatagctggccgtgacgtaaggctcgaagccgttctccaggttccacttgtactcgccgttggcgttggcgatccacttcgatgcaccgaccacctggtggccgctcaaatcacaggaggctggcgcgcccgggcgcaagctgacttccggcgggcacggcgcatccttgtaagacaggtaactcacatcattgaacgagccgttgaggttcagcgtcaggcccttgatcggcaccagcgtgctttccacttcaacgccgcgcgagcgcacagagcccgcgttggtcaggtattgcacgcggttgctgtcgtcataggcgttggtctggtagccgttgacctgggtccagaacaggttggcattgagctgcaggcggcggtcccacagcgtgcttttaaagcccagctcggcgttgttggcgcgttcggtaccgaccagcaatgagtccgccccggctgtcggcgcggagcctaccaccaggttgaccccgccggacttctcgccgtgggacaaagtggcgtaacccaacaggttttcattgaagtgatagctgaggttcagcaggccggatgggctggtgctgtactggctgagatcgccggagtcataaatacccgctcgcccgcgccgcgcggtggccgccgcaccggtgactgcggcgccacccagcggcgcgttgcggctgacccaggcgcttttctcttcataggtgccgcgcacgccggcggtgaaatccaggcgctcggtaaggtgccaggtgccttgggcaaacagcgcaaaactgtcggtgcgaatatgcccgttgcccacactgctcacgttattcagcgcgccggtcggcgtgccattccagatatccgccttgggcccgtaataggcgaaggacttgttatccagcgagttgccgaagtagtaggcgccgagcacgtaatcaaagaaaccaccggtaggcgaagccaggcggaattcctgggaccactgcttatcctccaccgacacgcccgcgttatacgtcgccggcacgttgaggccatcgtcgttgcgcggggtgaaattccagaagcggtaggagctgacagacgtcagggtgaagtcgctcggcaaggtccagttggcttcaagcgacgtgccgccctgaaacacggtgacgtgctggtcgctgtccaggttgaccttgcggtgagtgccgtccaccagcgtggcgcccgccgcattggcgcgcgattggtacaggttggtgccattgatggtcggcccggtgctgtacagcacgcgggtgccggcgctggaatcctcttcgttgtaatcgccgatccagcgcgcattgaaggtttcgctgggcttgtacagcagctgcccgcgaaagccctggcgtgagccgccgttgaggtcatggccgttgtattcgtttttgatgtcgccgtcgctgcgggtgcgataggccgaaaaacgcccggccagatcatcggtgagcggcccggaaatcgtgcctttggtctggaagtacccgtcctcgcccaacgaggtttcgatgctgcgttccggggtaaaacttggcgcgcgggtgctgatgttgatcaccccggcggtggtgttcttgccgaacaaggtgccttgcgggccgcgcaagacttcgagctgctcgatgtccatcaaatcgaacaccgccatgcctggccggcccagatagacgttgtcgatatacagccccacgctgccttccaggccatcgctcgccgggttgttgcccaggccgcgaatcgacacgctggactggcgcgcgtgcatgtaggcgacgttgacgctgggcaccagctgctgcaaatcctgaatccggtacacccgctggctctcaagcgcctggccgcctaagacgctcatcggcgtcggcacttcctgggcgctttcggtgcgccgccgcgccgtcacagtgaccgtctcaagctggccgctggcgttttcgcccttgctggcaggtgctggcgtttcggcggcctgggtcggcgaccaactggtactaccggccaccaacatggccaggggcaaggacttcaacagactcataagcggctccggaacccggaaatatccatctaccgatattcccttaagttatttatttatgtttttacgaacatttactgcataagagatagcctttataaggagtcgacctaatgcatagccaatgcatttccccgatatttttgatgtgaaaaatgcatatcgatttgcgtcagttacgccacttcattgccctcgccgaacaacgcagttttgtcgcggcggcacaggccgtgaacctgtcgcagtcggcgttcagccgcagcatccaggcgctggagcacagcgccggttgccagttggtggaccgtggtcgcaaggacctggcgccgaccaaacaaggccaggtgctgctcgaacatgcgcggcggctggtcagcggcgcgcagcagttggccaacgagatcagccagttcaatggcctggaggccggtgagctgcgcttcggctgcggcccggcgcccgctgcggggttgatcccgcgtgccatcggcagttttatcgggcgttaccccaaggctcgcgtgcagtttcaggtggatgactggcaaagcctgagcaaacgcctgctcagcgaggagttcgaattcttcgtcgccgacacccgccacttcgaagccaacccggactaccacacccaccgcctgcgcccgcggcgctggtatttctgctgccgcgccgggcacccgctggccgggcgcgacagcgtgagcgccgccgagctgatgagttacccactggccgtgaccatccgcccgccgaacttgcgcaaggtgattgtcgacctcagcggccggccggattacctgcccaatgtggagtgtgaaaacggctacagcctgatgggtgtggtgctgcgttccgacgctatcggcatcgtcagtgccaacagcgacgtgctgcacatggcccggggtgagctggtgtgtttgaagattgatggcctggcggaggatctggaggagcgctatacgcgctacgggattgtcagccgcgcggggtatcggttgtcgcctttggcagaggcgatgatcgagcagatcaaggagattgatgagcgggatgaggacgtgtgcgcgctggagaatctcgctgtctgagcgggcgccatcgcaggcaagccagctcccacaggggaatgcattccttgcataaaacccagtccccaaatgcacttgcccgccaaccggtataacggcaaaaacagaggcctgttccccattcggtaaagccctcatgtccgaacccaactccgtacgcaacgtgctctacatcatgtgcgaccaactgcgccgcgattacctgtcgtgctacggccacgcgcatttgcacacgccgaatatcgaccgcctcgccaccgccggcgtgcgtttcagccgcgcttacacccagggcaccatttgcgggccgtcgcggatgtcggcgtacaccgggcgctatgtcagcagccatcaggtggcctggaacgccgtgccgctgccattggaagaactgaccattggcgactacctgcgcccccacggcattcgcaccgcgctggtgggcaagacccacgccacgcccaacctggatgccttgcagcgcctgaacatcgaccccgacagtgcgcaggccgagccgctgaatgaggtcggctttgacgcgtatttgcgccacgacggcatctaccccgacagcccgttgttcgacgataaacgcgagtccgcgccttacacccattacctgcgcgagaaaggctacggcggcgccaacccttggcatgaatgggccaattccgctgcgagcgacaacggcgaagtgctcagcggctggcacatgcgcaatgccggcttgcccgcgcgagtagccgaagcgcattcggaaacggtctacaccactgaccgcgccatcgactttattggcgagcaaggcgagcggccgtggtgcctgcacttgtcctatatcaagccgcactggccctacctcgcgccggcgccctatcacgcgctatacggtgccgagcacatccaggcacccgttcagcctgagcagcccagcgatcacccggtgtaccaggcattcagacagcaccaggaaagcctgaatttctcccgtgacgaggtgcggctcacggtgattccgacctacatgggcttgatcaaacagatcgacgatcaactcggccggctgttcgatttcctgcaaagcaatggccgctggaacgacacattgatcgtgttcaccagcgaccatggcgactttcttggcgatcattttctgggtgaaaaagagtttttgctggagccggcggtgggcgttccgttgatcgttcgcgacccgcgcgccagtgccgacatcagccgtggctcggtggatgagcgcttggtggaaaccattgatgcgctgccaaccttcctcgatgcattgggcctgccctcggccgagcaccgactggaaggccgctcattaattccgctgctgcacggtcaagaaaccgtctggcgccactacgccatcgctgaatacgactacgccttccaggccccggcgcgcgaacgtctggagcagccgatcgaccgctgccgcatgaccatggtgcgcagcgagcgctggaaatacctggcctacgacggttttcgtgcacagctgtttgacctcgaaaacgacccgcaggagttgcgcgatctgggggatgaccccgcgtatgccgaggtgcgcgagacccattcgggctatctgttcgaatggctgcgcgggttgaagcggcgcacgaccatcagccactcggagatcgccctgcgtgggcaacggtttcgctatggcgagccggaggcggaaaaggtcgtgcaaatcggcgtctggtaagcaccacaaacccaatgtgggtaagggcttgtgtgggagcgggcttgctcgctcccacacaagcgcggccccacagtgagcgttgtgttggcttatagacctttggtggttttgctggcctgcccttgtacacccaccggcacatcgcccttgagcgttacccggcgcacgatgcgctcctgggtgccgtaatcatccaccgcataatgctgggtcgcgcggttgtcccagatggctacgtcgccagtgttccagcgccagcgcacggtgttttccaggcgggtgacgtggctttgcagcaggttgaacagttgcgccgaatccgcctgggaatagcctttcaggcgtttgacgaagtgcccgagcaacaaggttttttcgccgctgaccgggtgcacgcgcaccaccgggtgctcggtttcgtacacggtggaggtgaagatcttgcggtattcctcaagcttttccaccgacacgtccggtttgcgcgcggcgtagtcgtattcgttgctgtgcaccgcccacaggttgtccgccagcacccgcagctcggcgctgaggtcgttgtaggcgctggcggtgttggcccacactgtgtcgccaccggatttgggcgccagcaccgaacgcaggatggaggctttgggataagcgtcgacgaaggtcacgtcggtgtgccacgaattggcgcgctggccacggccgccgtccagttccatcaggaagcgcgtgccgtcacgcacgggcaccgtcgggtgagcaatcggctcgccgagcaggtgggcgaaggcttcctggccttggtcatcaaggtgggtctgctcgcgaaagaagatcactttgtactgcaccagcgcctgctggatggcctcgacggtggcggcatccaggtcgccagccagcttgacgccccgaatttcggcaccaatgcgcccggcgaccgggtgaatgtccagcgcctgggcgatgggttgaacagctaatgcggcgttgctcattgtgatgaccctcaagtgcctgatggtggggacgctttccggcaacgctctattgatatgcaatttagatctagcagatgaatagatgcttcgttgacggaataagagcttgcatttaaaacctcagctcccctggtcgcaaatgccttcgacctatttttcagatgccgggaaagcatatggatcttcgccaactgcgctacttcatcgccctcaacgaacaccgcagtttcgtgcgcgcagcagacgccatgggcatcactcaacccgcgttcagccgtagcatccaggggctggaacaggagttcggctgcgtgctggtcgaccggggcaacaaggatttacgccccacgcccgagggccaagtggtgctgcaacacgccctgagcctggtgcacggtgccgcgttgctgagcagtgaagtcacgcgcatgaccaagctcgacgccggcgacctgcgcttcggcacgggcccggcaccggcggtgaaactggtaccggatgcggtggcacggtttatcagcgcgcacccgaaaatccgcacgagtttccaggtggataactgggagaaactcagccgcgcgttgagccgtgaggagattgaattttttatcgccgacatccgccagtttgaaaacgatccgaatttccagacccgcgcactcaccccaaagcgcggtgtgtttttctgccgcccggggcacccgctgctggccaaggacagcctgtcgaccaacgacatgtttgactacccgctggcctcgccgctgatctcccagggcattcgcaaactgttggcgaacctgagcgggcgcatggatttttcgccgagcattcagaccgagcacttcccggcgctggtgaagattgtgttgcagtccaacgccatcggcgtgggcaccgaggaagcgtttgccgaagacatcgcccagggcacgttggtgctgctgcactggcgcaatctgccgcagaacctggagaccatgagtgcgcgctgcgggattgtcagccgcaccgggtcaaggttgtcgccagcggcgaaggcgatgatcgagacgctggtggaagtggacagggcgcaggtgagtgtggcggtctgaagggcctcatcgcaggcaagccagctcccacatgttgaactgtgtataccttcaagtgtgggagctggcttgcctgcgatagcaatagtccaatcaccaaaacccttagagccccgccgccgccagattcggcgccacccaatcactcacctgaaacggcttgcgaatcagcttctctttggacgccagatccaccgcatcctgcagtttcccaaggaacaccgggtccagggtcgaggggaaaatctcgctgagtttttcgtttttgaggtcattacccagaatcaccggtggataactcgcccggcccgacaccagatcgatataggcctgcttgttgttgtcatcggtcagccactgcacagcctgttgttgagccttgagcaactgggtgatgacctcggggtgttcgtcgacaaacttgccgctgcccaccagcaccgcctgaacactgcccgcgccacccaggtccttggtggtcagcggcagttcggccaggcccttggcttgcaacgccgccaggttcgccccgccccaagtcgcgtcaatctgcttggcggccagtgcggcgccggcggcgttgaagtccaggttgatgactttcaggtctttctcgctcaagccctggctggccaaggcgctgtcgagcgacaactgggtggcggtgccacggaacaccgccacgcgtttgcccttgaggtcctgcaaggtcttgatgcccgaaccgggcactacgccgaggtactgtttgatgtcacgggcggtggcgctgagcaagcgggtgtcgaggccattggagcggccaatgatcgccgccaggtcgccgagataagccaggtccacctggccgttggcgaaggcttcattgatcacgggaccagcccctttgaagtaattccactgaatcttgatgccctggccggcgaaggctttttcaaagatttgctgttcgcgcagcacgtcggtgatgccgcctccgctgtgctggctgccggcactgagatccggcacggcaatgcggatttccttaaggtcggcggcgtgcaccaggccggccagcgcggtgcccgcgaacagggtgatcagacgtttgaagggcaatttcataagcgcagctcctggtgggcgaaggtcgcctggggagcagaaagtaggcataggcggatcaaaactttaaatactataaattcacaatttaatagcttttagctctatgcaagctaaaacgctgactccagagggttatgcataaacagcatcgaaaatattctccgaatgcattggatgcgtaacaagcaggggctttaaatgatttttcttatccctcaatcatcttgattacggctttataagatctaaatcacataacgccccaggcgacaacggaggtcctccatggcccgaatttcacttttgagcctgcctctggctgcccccgcacaaagcgcagctgcgcgctggccgaagctgggcgagcggctgttgccgtggctggtgccggtcgcgttgttcggcctgtggtggctggcaagccgcaatcactggatgagcgaacaaatcctgccgccgccttcactggtgtggagcagtgcggtagaactggctggcggcgagttgtggagccacttggcgatcagtttgcagcggctgttctggggtttgttcgcaggtattgccagcggcgccgtgctcggtgcagcgctgggcttcagcgcgcgggccgagcggctggtatttccgacattcagcgcgctgtcgcaagtccccacgctggcctggatccccctgttcatggtgtttttcggcattggtgaaaccctgaagctggtggtgctggtgaaagccatcgtggtgcccgtcaccctgcacaccctggtcggcgtgcgtgatgctcaacccaacctgcgtgaagccgcacgcgtgctgcgcttgcccacgcacctgctgattcgccgcctgatcctgcccgccgccctgcctgcctttatggccggtgtgcgcctggcgctggcggctggctggacttcgttgctggccgtggagctgctggcctccagcgaaggcatcggctacctgatggtgtgggcgcggcaattgttcatgctcgatatcgtctttgtgtgcatcgctgtcatcggcgtgctgggcgtggtgatggatcgcggtatcggctggctcgaccgcaagtgggtgcactggccgcacccggcgacggcgcagattcggcgcgggccgcgccatgaaggctggcagcgtttgcaacccctgttgttgccgctgctgttgctggcgctgtggcaggtggcgacgcatcacggctgggtggacccgaatattctggtcagcccatggacggtgctgcacaccaccgtcgcgggtgtggtcgacggcagcctgtccggcgccctcggcaaaagcctgggccgcaccttgggcggtttgatgctgggcggcggtttgggctttgttgtgggcctgtggctgggtttgtcacgacgtagtgaacgcgtgctcggcccgacactggccgcgctgcgccagatcgccattttcgcttgggtgccgttgctcaccgcgtggtttggcctgggtgaattggccaaatgggtgttcatcgccctcgctgcgttctttccgctgtttatcgccacccaacgcagtgtgttgaacctgtcaccgcagctgcgcgaagccgcgcaagtgctgcgcctgaacctgtttcaacggctgcgccggctgattttgccgggcgccgccgccgggattttcgccggcctgcgcctgagcctgatctacgcctggctgggtaccattggcgcggaatacttcatgccgtccaacggcggcatcggcagcctgatgatcggcgcccaacagctgctgcgcatggatttgatcatgagcggcatgttcctggtcggcctcaccggcgccacactcaacctgatcggccaacgcatcgaaacccgcgcgacccgctggagacacgcatgaacgcacctatcgtcagcttcaaccatgtgggcaaaagcttcgatgtcgacggcttcgaactggaagccatccgcgaattcaacctggagattgccgagggtgagttcgtcgccattgtcggctccagcggctgcggcaaatccaccttgttgcgcttgctggtggggctggatacgcagtttcgcggcgaaattcaggtggacggaaaagccgtgagcggcattggcggcgagcgcggcatcgtgttccaggaacaccgtttgttcccgtggctgaccgtggcgcagaacatcggtttgggtctggtcaacgaggtgctgagcgaggccgaacgcaaccggcgcatcagtgatttcatcgagctggtgggcctcactgacttcacccgcgcctacccccatcaactctccggcggcatggcgcaacgcgtggccattgcccgtgggttggtggccagcccgcgcattttgttgctggatgaaccgttcggcgccctcgacgcgctgacccgccagcagatgcaggacgagctgttggcgatccgcgcccgcgcgaaaatcaccaccgtgctggtcacacacgatgtggaagaagcgattttcctcgccgaccgcgtggtggtgatggagcctcggcctgggcggatcaagcaggtggtggacatcgccctgccccatccgcgccagcgcagcagtttcgaattccaccaactgcgcgaagagctgctgcacgaattgatcagcgacggccattaccagccgccggtgcgtgagcaaatccgcgacctgccattggcgtttattgcctgctgactgaggaacatcttgatgccgcaacgtcctaatttcctggtgattctggccgatgacatgggtttctccgacctcggcgcgtttggcggggagatctccaccccacacctcgacgccctggcactgaacggcctgcgcctgaccgacttccacaccgcgcccacctgctcgccgacccgttcgatgctgctgaccggcaccgaccaccatatcgccggcatcggcaccatggccgaggcgctgacgccggagctgatcggcaagcccggttacgagggttacctcaacgataaagtcgtggccctgccggagctgctgcgcgaagccggttaccagaccttgatgagcggcaaatggcacctgggcctgaccgccgaactggcgccccatgcgcggggtttcgagcggtcgttctcgctgttgccgggggcggccaaccactatggttttgagccgacctacgacgacaccacgcccggcctgctcaaatccaccccggcgctgtacatcgaggacgacaggttcgtcgagcgcctgcccgagggtttctactcctccgacgcctttggcgacaagctgctgcagtacctcaaggaacgcgatcaggcacggccgttcttcgcttacctgccgttttctgcgccacactggccgttgcaggcgcccgccgagatcgtcgacaaataccgcggccgctatgacgctggccccgaggtactgcgcctggagcgcctggaaaaactcaaggctttggggttgatagaggccggcgttgagccccatccgctgatcgagctgaacacccaatgggccgccttgaccgacgaacaacgccaggtctcggcgcgggcgatggaagtgtatgcggcgatggtcgagcgcatggactggaacatcggccgggtggtggagtacttgcgccagcaggggcagctggataacacctttatcgtgttcatgtccgataacggtgccgaaggggcgttgctggaggccttccccaagtttgggcctgagttgctgacgtacctcaaccagcattacgacaaccgcctggaaaacatcggccgcgccaattcctacgtctggtacggcccgtcctgggcccaagtggcaaccgcaccgtcgcggctgttcaaggcatttaccaccgagggcgggatccgcgtgccggcgctggtgcattacccgcagctgccactcaaagggcgcatcagccatgggtttggcacggtgatggacatcacgccgacccttctggacctggccggtgtgcgccaccccggcaagcaatggcggggcaagccggtggctccattgcgcggcaagtcatggctgggctttttgtctggcgaaacggcgcaagtgcacgatgaacacaccgtgaccggctgggagctgttcggccgccgcgccattcgccagggccagtggaaagccgtgtacatccccggccccgtcggtccggcgaggtggcagctgtatgacctgggccaagaccccggcgaaatccatgacctggccgtgagccacccggaaaagctcgccaccttgatcgaccactggcagcgctacgtggacgaaaccggcgtcatcctcagcgcatcgccgtttcagccggattgagcccggtgtttgcgcgggcctgcggttccaggcggttggcccgcgcaaacgtcccgaagtcattgaagcgcacgcccatctcagccatcaccttgtgcgccaccttggcggtcatctggcggatgtaaaacggttccttcaccacaaagtgatggatgccgtgggtgctgccgaagttgaagcagaacgcctgcaacggccacatccaccacgggttgagcacctgggtttgctggatcacgttacccaactccacgtcaccgtagtagtgcatgttggagctgacaaagtgcaggcaaaaggtgcgcagcacgttggggccgatgatcaccacggcggcgatgtcgatcacctgcatcacctgcaaggtgctggccgaccagtcgatgggcgcgcccagcaggctggcgacgccgttggccgcatgaaagcccaggaacacataccacgcgccccagtgcagcagcgccaagggtgcgtacaccagcagcgagcgcttgaggatcttgagtttgtggctccaggtcttcgcgcgcagcatacggatgaacgccgacatcacgttatcgccgaccatcagcaaccgcgcaaagccccagggctcgccgttggtgatggcgcgctcttccatgtcggtctcggtgccggagaccttgtggtggttgaggtgcaggtggcggcgtatccacgggttgatggtgctgggtcgcgccagccacaccaagcccatcatcaggttgtggggcaggcgctgtttgcgaaagtacatgctgtggatcaggtcgtgttccagctcgtgggtcagcgaagcgaggaaggcgttgagcaacaggcagacccaccaggccatatggccgctgatgtagagcgcagccgagccgagcatgcccgccagcgcaaacgccaggatgcccgcgcccagtgcgtcctgatgcagcaaccaggggtgttgctggcgcaggcgcacgccttcggcaagcaccacttcacgaattttcgctgaacgctgttgcgcgttcatctgctggggacttgcagaagtaccgtccatgcttccatcctcttgtttactgatgcgtccatcctgccccaagcgatcgcgcaggacgctagccccggacgccaacctgttgaccgcaagcgccaatcgccatgaccgaacccacctcgctcgccagctggacccgcgccctgcgcaagcagctcgacgccctgggcctggacagcaccgggctgtgcgcgcaagccgggctcgacccgctgcagatggacgaccccaacgcgcgctacccgctgtcggccaccacgcgcctgtgggcgctggcggtgcaggccagcggcgacccggcgattggcttgcgggtatcgcggtttgtcagccccaccacctttcatgcgctgggttacgcgctggtggccagcggcagcttgcgcgaggtgttcgaacgcatcgtgcgctatcaccaggtggtcagcgatgccctgacgctggagcttagccgggatggcgagcgctaccattttcgattgctgcaaccaccgggcagcccggcgccggcgctcgaagcgattgatgcgtttgcggcgatttatgtgcgcacgtgccgcaatcggctgggccgcgagtacgcaccgttggcggtgcacctgcgcaggcccgaaccggcagaccccaagccgtggcacacggtgtttcgcgcgccggtgttttttggtgccgaggaggatcggctggagttcgccgcccgggatttcgacagccacctggacgacgccaacccggagctggccgaacacaatgaaaccgtgctcaagcgcaccctcgcccagctgcaaccgctgacctgggagcgcaaggtacgcggcgttatcgaggcgcaactgccggatggcgagccgagcgccgaacgggttgcccaagcgctgcacctgagcctgcgcagtttgcagcggcatctggcggatgaggggtgtcggtttgatgcgttgctcaatgaatgccgggagaacctggcgctgctgcacttgcgggacccgcagtgctcattggcagagatcagtcatttgttggggtttgccgataccagcagtttcaaccgggcgttcaagcggtggacggggctgacgccggggcagtttcgggatgggttgcggtaggtggatttttggtgaaggtgcgggcctcatcgcaggcaagccagctcccacaggggaatgctttgcacaattggaatgcaatcagaggtgggagctggcttgcctgcgatggcgcccgatcagtcaacgcccccggtcacgccgcagcaacttcctcacccgcgccaccaacgccttggcctcaaagggcttgagcaaataatcatcctcgtgcagctccaacccgcgcagccggtcttcaatcccgcccggtgtggtcaggaacaacatcggtgtctgccccttcaagcgaatcgcctgctgcaacttccaggcattcagccccggcagcatcacatccaggatcaccaggtcgtactcggtgctttccacaaaacgcagcgccgccatgccattggccgcgacctccacggtgtagccggcctcgttcaggccctgggccattcgctgtgcctcgtcggattcatgttccactaacagcacacgcataacacacctcgattaatcagacgtgcaggctaccaccctcaggtgtgcgtcgcctcacgcaggcgctgaacgtcgagaatctcgatttcgccataacccaggcgcaccacaccttgggcttgcaggtccttgagcagggcgttggtcgtctggcgcgacaggctcagcatcgccgccaggtcttcctggggcagttgcagcacacggcgtgaatgcgcgatgtcgccatagccttcagcgatcatcaacaagcgatgggccagacgaaccggtgccggcatcaggctgagctgttccaggccgataaaactcaggcgcagcttctggctcatcagcaacgccaggttgcgccagtagtgcggcgtttcatcaaggacagccagcagtgcttgctgcggcacctgcaacaaggtgcaaggccccattgcacaggcgtcgtgggtgcgcggcaagccgtcgaacaggcagatttcgccgaaccagtagggcaactccaccaggctcaacacggcttccttgccctgttcattcaccgcactgatgcgcaacgtgccgtcgagcaccgcatacaggccgcacggcgggtcgccgcgtttgaacaggtattgccccgccgtcagctgccgaagccgcgcgtgggccagcaggctatgctgaaaggactcgggcaggtggctgaaccagtgaccggtggccagccgtgaatgccatttctctgtgtccatgagaactccgaagattgtcgcccagctgacagtcaggcgcaggctgacagggcatgatcaaacatcctacaggaggaacaacaatgaaaagcctcgtcgatcacctcagccaatacgccgcgtaccaccgcgacccgcgcaatatcgccagccactttatcggcattccgctgattgtcgtggccgtggccgtgctgctctcacgccccgaatgggcagtgggtgggctgtggatctccccggcggtgattgtcgcgctgttttcggcgtggttttacctgcgcctggaactggcgctgggcgtgctgatggcggtgctgatgggcttgtcggtgtgggccgggcatgtactggccgcgcaaagcacgcctgtgtggctcggcagcggtatcgggatgtttgtggtgggttgggtgattcagtttgtcgggcattactacgaaggccgcaagcctgcgtttgtggatgatgtgtcagggctgatcgtcgggccgttgtttgtggtggcggagctggcgtttctggtggggttgcggggggatttgaagcagcagatcgagcagcgctcggggcctgtaatgcgccgcagtctagagccgagagaggtctaaatgtgggagcgggcttgctcgcgaatgcggtctatcagttgatgaatgcatcgactgacacgccgtcttcgcgagcaagcccgctcccacatgggtcttgcggtgttattacgctttttgccagaccttgggtttgaagaacaaggtctcgccacgggccaaaccagtcaggctgtcgtggtctttcaccacttcggcttcgatcagctcgctttggccttccaccttcagcgtcacgcgcgtggtcgcgcccagcgggcgaatatcacgcacttcagccgcgtggtgatcttccagctcatggcgcgacagcgacacttcgtgcggacggaacagcacgtggttgtcttcacccaggtgcaggcggttcgaatcaccgaggaagtggtaaacaaaatcgctcgccgggttttcgtagacttcgcccggtgaaccgatctgctcgatcacgcccttgttcatcaccacgatacggtcagccacttccatggcctcttcctggtcgtgggtcacgaagacggaagtcaggttgatgtcttcgtgcagccgcgccagccagcggcgcagttctttacgcaccttggcgtcgagggcgccgaagggttcatccagcagcagcactttgggttcaaccgccagggcccgggccagggcgatacgctggcgctggccgccggagagctgttccgggtagcggtcggacagccaatcgagttgcaccatgttcagcagttcgtggaccttcaccgcgatctggctttcagtcgggcgctggtttttcggcttcatgcgcaggccgaaagccacgttgtcgaacacggtcatgtggcggaacagcgcgtagtgctggaacacaaacccgacgttgcgatcccgcacgtcgtggccggacacgtcttcaccgtggaacacgatgctgccgtcatctggcgtttccaggcctgcaatgatgcgcagcaaggtggtcttgccgcagccggacggaccgagcaacgccaccagctcgccactctggatgtccagattgatgctgttcagggccttgaaggcgttgaagttcttgctgacattacggacttcgatcgacatgacttattcctcaccggcgcttttgcgcaggcggttgatacggttctcgctccactgcttgagcagcaggatgaagagcgccaggatcagcagcaggctggccaccgcaaacgcggcgacgtggttgtattcgttgtagagaatctcgacgtgcagcggcagggtgttggtgacgccacggatgtggccggacaccaccgacactgcgccgaactcgcccatggcccgcgcggtacacagcaccacgccgtagatcaggccccatttgatgttcggcacggtcacgtgccagaacatctgccagccattggcgccgagcaagcgtgcggcctcttcttcctgggtgccctgttcctgcatcagcgggatcagctcacgagccacgaagggcacggtgacgaagatggtcgccagcacaatgccgggcaaggcgaacacgatctggatatcgtggtcggccagccaagggccgaagaagccctgggcgccgaacatcagtacgtagaccaggcccgcgattaccggcgacaccgagaacggcaggtcgatgagcgtgaccaggatgcttttgccacggaacgagtacttgctcacgcaccaggcggcgctgacgccgaataccacgttgagcggcactgagatcaccacggcgatcaccgtgagtttcaatgccgacagcgcgtcgggttccaggatcgcagtgaagaacgcgccgaggccgttcttcaagccttgagtcaccacgatcagcaatggcaacagcaggaacaacgcgaacaccagccagccaaggctgatcaggatgcgtcgggacgtcgcgctgccacggcgggcagcgttggccgaggacgcagcggaaatagacgattgggacatgttccgcgcctccttatggacgttcgatgcgccgctgcaacaagttgatcagcagcaacaggacaaaggaaaccaccagcatcagcacaccgatggaggtggcgccgcggtagtcgtattggtcgagcttgaccatgatcagcaacggcaggatctcggtcttcatcggcatgttgccggcgatgaagatcaccgaaccgtactcgccgacgccacgggcaaaggccagggcgaagccggtcagccaggcgggcagcagggcaggcacgaggatgtagcggaacacctgcaacggcttggcacccaggcaggcggcggcttcttcgatttcccgggggatatcggccagtaccggctgcaccgtgcgcaccacaaagggcagcgtgacaaaggtcagcgccagggtgatgcccaacggggtgtaggcgatcttgaagcccaggtcggcggcgaactggccaaccagcccgttaggcgtatacagcgcggtcagcgcaataccggctacggcagtgggcagggcaaacggcaggtcgatcatcgcatcgatgaccttgcggccggggaaggtgtagcgcaccagcacccaggccagcagcgtaccgatcacgccgttgatcaacgcggcgtacagcgcggtgctgaagctcagttgcaacgccgccagcacgcgtggtgcggagatgatgttccagaactgatcccaggtgagttgagcggcgtgtacaaacatcgccgcgagggggatgagtacgagcaggctgaggtacaccacggtgtagcccagcgtcagcccgaagccgggtatgacgggggagatacgacgcgacataagagtccttggttaaagggtagaaaccactgtaggagcgcgcttcgtgtgggagctggcttgcctgcgatgcagacaccgcggtgtaactgatacaccgtggtgatgctatcgcaggcaagccagctcccacagaaaagcgaggctcctacaggtactttggcttactgtgcggtgtaaatctggtcgaacacgccgccgtcgttaaagaatttcggttgggcagttttccagccgccgaagtctttgtcgatagtcaccaggtccagtttcgggaactgttgagcgtatttggcggcaaccgctgcatcgcgtgggcggtagaagttctttgccgcaatctcctggccagccgggctgtacaggtgtttgaggtattcggtggcaatttcggtgttgccctttttctcggcattcttgtcgaccacggcaaccggtggttcggccaggatcgacagggaaggcacgacgatgtcgaacttgtcggcgccgccgtcttctttcagggccaggaacgcttcgttttcccaggccagcaacacgtcaccctgaccgttgttgacgaaggtgatggttgaaccgcgagcgcctgtgtccagcaccggcacgtgcttgaacagctctttcacgtactcctgggccttggcttcgctgccaccggatttcaggccgtaggcccaggcggcgaggaagttccagcgcgcaccgccggaggttttcgggttcggggtgatgaccgaaacgtctttcttgatcaggtcgccccagtccttgatgcctttagggttgcccttgcgcaccaggaacacgatggtcgaggtgtacggggtgctcgcatccggcaggcgggtttgccagttttccggcagggtcttgcccaatttggcgatttcgtcgatgtcaccggccagggccagggtcaccacgtcggcgcgcaggccatcgattacggcgcggccttgcttgcccgagccgccgtgggattgctggatcttgacgttgtcacccgggtgggactgtttccagaagttggtgaactcagcgttgtaatcctggtacagctcacgggtagggtcgtacgagacgttgagcaactcgtagtccttggcaacggcagaacctgcaaacacggcactggccagtgcggccagggcgtaacggcgaatcgacgacatagaaggctcctgaaattctggggtgttggctttttcttatagttgcgggtctagcatgcgaatcgccgtcagtgcttaagccggtttgttgcccgggttctgcaaacggaatttttctttgcgttcgatctgtaccacttgggcgttgtgcacagtgatttccaccgcgccaaaccgcagatcgcgcagggcgctctggatctcacgcaaaatggctgcttcgtcctggccgtcgacgctacgtagagatgcgctcatggtctcgctcctgaaatgaatagtgcctcgcagtggcggcactgcttgcggcgtgagggcgatagtagataagcgcggatattcttaaaaatactatttaagaatgtttatataaccagaaagaattttctgacaggacgtggggttgcgcgcgagttttgtgcccgagcaccgaaataaagccttgagaagatccaaatgtgggagctggcttgcctgcgatagcggtgtgtcagctcatacactcgtcactgacctaccgctatcgcaggcaagccagctcccacactttgagtgcatttcaaccctggattggaggtgcccggtcccaattgatttcacttgccggcaccggccgcccaaaccaatacccctgccccatgtcgcattcctgcgccagcagaaaccgcgcctgctccatttgctcgatgccttcggcgtgcacctgcatgcccatgcttttagccaaggcgatcaccacacgcacaatcgccgcgtcgtcctcatcccacggcagcccggcgacaaaaccctggtcgatcttgagcttctgcaccggcaagcgcttgaggcgcagcagcgaggaatagccggtaccaaagtcgtcgatcgccaggcgcaggcccagttcgcgcaggcggtgcaactgctcaagggccacttcgggatcgtccatcaccgcgctttcggtgacttccagttcaagaaacgccggatcaagccccgtagcgtgcagcacctgggcgacttgctcgtacagctcacgcctggcaaacaaacggctggagacgttgacggcgataaagctcaacggtgcgccatcagccagccactggcccatttggcgacacgcttggtccatgacccaggcatcgatgtcggctatcaacccggtccgctcagcgatggggataaaatcccccggcggcaccaggccacgctccgggtgctgccagcgcaccaaggcttcgacgccaatcaggcggctgccttgcagctcgtgcacgggttggtaatagacgcgcaactcgtgctgatcaagggcccggcgcagttcgttggcgatttccacgcggtgttgggcatgggcagtcagctcttcggtgtacaaggcatacccctcgcggcccgcgcccttggccttgaacagcgcagaatcggcgttgcgcaacaactgttcggcactcagggcatcactgggaaacaggctgatgccgatgctggcgctgataaacagttggtgcccgtcaaagatgaacggctgtttcattgcatcgagcatgcgctgggccaatgccgcggcctgccctgcctgtggacaactttccgccagcaccgcgaactcgtccccgcccagccgcgccagggtcacgccgggaccgaacagggctttgaggcgctcaccgacggccttgagcaactggtcaccgacagtgtggccgaggctgtcgttgatgatcttgaagtggtccaggtccagcatcagcagcgcgcagccgcgtttatgcacctgtgccgacgccagcgcctgctcggcgcggtcggtgaacagcaggcggttgggcaaatcggtcagcgggtcgtggtgggcgaggtgcgccagttcgtgctcggaatccttgatggcgctgatatcggagaacacggcgacgtaatggctgatctggcctcggtcgtcatggatcacgcggatggtttgccattgcgggtaaatctcgccgcttttgcgccggttccagatttcaccactccattcgcccgtgcgttcgagtgtctggaacatctgttgatagaaattcgacgaatggcgaccggatttgaacaggttcggccgctcgcccatgacgtcttcgcggcggtagccggtgatcgccatgaacgcccggttgacatgcacgatcaggccccgggcgtcggtgaccagcacaccttcgcgggtgcagtcgaacacggcggcggcctgttgcaggcgctcgcggttttctttgaggggctgctgctgccggtgagtaagagcgaaacgcaggcaaatcaggtagatcgccacggtgctgagggcaatccacacgtagccgcgcacctgcagccagtggcccaacgccttcgggttatcgagaaagttgattaatagagggttgctgagctggaaccaggcgatggaagccagcaggtataccagccccacacgcagggcacctcggtatgaaaacagcatagagtcagtaatccttacccaaaaaacataatcgccccacaaaggctgcggattatagaataagaaacatccagtcactcctatctgaaagggcggctggttttatctgtgagcttagtgataatgcgtgagctgtttttttctttatctgagggccatacagcctatgtggtacaacggttttcttgacctgtcagcctggcaactggtggcagtcacgctgttgatgacccacgtgaccattcttggggtcaccgtctatctgcaccgttattcagcccatcgctccctggagctcaatggtggcctgaaacacttcttccgcttctggctgtggctgaccacggcgcagaacacccgcgagtggaccgccatccaccgcaagcaccacgccaagtgcgaaaccgtcgatgacccgcacagcccggtcatcaaaggcctgtctaccgtgatgcgcaaaggcgccgagctgtaccgcgccgaagctgaaaaccccgagaccctgcgtatctacggcaagaactgcccggaagactggatcgaacgcaaaatctacacgccctaccccttgctgggcgtggcgatcatggcggtcatcgacctgctgctgttcggcaccatcggcatcaccatctgggccatccagatgatgtggattccgttctgggccgccggcgtgatcaacggcctgggccacgcggtgggctatcgcaacttcgaatgccgtgacgcggcgaccaacctggtgccatggggcatcattgtgggcggcgaagaactgcacaacaaccaccacacctaccccaactccgccaaattgtcggtgaaaaaatgggagttcgacctgggctgggcatggatcaaggtgttcagcttcctgcgcctggccaaggtgcagcgcgtggcgccgatcgcgcaccgcgttgaaggcaagggccatctggacatggacaccgccatggcgatcctcaacaaccgctttcagatcatggcccagtaccgcaaattggtgatcggcccgttggtcaagcaggagctggagaaggtcgatcattcggtacgccaccagttccaccgtgccaagcgcctgctatcccgtgagaccagcctgctggatgaccgccaccacgtgcgcatccagagcatgctggaacacagccatgccctgacggtgatctacgagaagcgcctggctttgcagcagatctggctcaagaccagctccaacggccacgacatgctcgccgcgatcaaggaatgggtgcatgaagccgaggccagcggcatccagtcactgcgtgattttgcccaccaattgaagacctactcgctgcgccctgcggcggtctgaacaggcactcactgcccgcccgtggcaagcgggcttctgtggcgagcgggcttgccacagaaagtccgatcgccacaagcacgttcgccagcgcaaaaccactcaccaaaaccagcctgttcatcacgaaaatcgggctacaaccggtttctgacgtcatttcttagtcagccggatcacggaacttcaccgcaattcccctctctcaatgaacacttcgccatcatggtggccccttgtagtgaccgcggctccatcctgcggcgcgcccagagagagttgtaccgatggttctcgaaaacccctttccacccgacacgcccacggccgagccttctcgcccagccgcagcggcgaccttgctggcgctggtgcacgcccagggtgaagtcgagcggctgagtgaacgcgaacaactgctcagttcactgctggtcagcgtgaacgccgtgctgtgggccattgattgggaaacacgccgcgtactgtacgtgagcccggcttacgaacgggtattcggccgttcggcagcattgctgctggccgaccatcgggaatggcgcaacagcattcaccccgaagacctcgactacgccgagcacagcctggcccgcgtgctggaacagggcgccgtggaggatcgtgagtaccgcatcatcaccgccgacgggcagatccgctggctgagcgacaagtgctacatcaaccagcaggtggagcccggtgagccggtgatcgtggtcggcatggccgaagacatcaccgaaaagaaacagatggaactggagttgcaccgcctggccaccaccgacgtgctgacccagagcagcaaccgtcggcactttttcgagtgcgccaaccaggccttcgacagcgcctgcgcccaaggcgcgccgctggcgttcctgttgctggatatcgatgacttcaaggacgtcaacgactcctacggccatctggagggcgatcaggtgttgcggcgtatcgcggagagtgggcgaagcgtattacgccgtggcgacctgttcgggcgcattggcggcgaagaattcgccgccgtactgcccggttgcgcaccggaaatggcgctgcaggtggccgaacggctgggcaaggaaatccaggcgctgaaattcagctacgaagggcgggattttaccgtaaccgtcagccagggcctggccagcttgcgcgaggaagattcaaccctggacagcctgttcgcacgggctgatgcggcgatgtatgaggccaagcgcttgggcaaaaaccgcgtgatcgcggactgagacctatcgctccaatcctgtgaaaactggcttgtgtgggagctggcttgcctgcgatgcagacacctcggcctatcagccataccgaggtgatgcaatcgcaggcaagccagctcccacaggcgttcggcagtggctatgagcttttgcgcacccgcgtcaactccgacagcccgactttcaacaaccgcgcagtcttgcccttggccagttcttccagcccctcatgctcggtcagtcgcgccatctgcgccgccaggtttaccaccaacgcatcccgcgaatacaccccgccttcgagggaataggtcgccgcaatcaactggcgcaactcaagcggcaaacgccaacgcgttcgcaacgccgacccgtaggcggcgccaaaggtgaacagggactcgccaatcaattcgtcatccagcgcgccgccgccctgacgccagtcttccaggcagcgcaaaagcgccaggtcgcccagccggtgaaggataccggcgctgtagcaccgctcgtgatccaactccagcatgcgcgccaaccggcgggcgtagtcggcagtgtcttgggacaactgccaatggcgctcggcgtaggccaccagggccggatcgcccagcactacgttgtgcttgagcgcaaggccaagaatcaggttcatgctctgcccggccaccagtttgcgcagcgctgccggcagggtctgcaccggcgtgccgtgatgcccggcgctgttggcggcagcgatcagcacggcggtgatttgcgggtccatgcgcacccggtcttcgagacgcttgagatccaggccctcagggccgaggctgaactgcacggcggccttcacatccacccgcagcggcgcgccgtcagacgcttcgcggcggcgctccagaaacaccggcaaggtcatgcctggcgccagcggcggaatttcgcagtaaacggtttcgccttcattgagcagcaggtcttgcagacgctgggtcaggctttccatgttcagaggcttggtcaggtaggccgtaggggccaggggcaaggcttcacgcacgcttgcgctgtcattgcggctgctcagcaaaatgaagggcagcgcgggcgagcgacgttgctggcgcacactgcgcagcaggctcaggccatcgacgcccggcagctcccaatccgccaggatcaggtcgtaggtattttctcgcagcagcgtcgctgcttgctggccatcggcacacacatccagccgagcgtcacagcgcacgttcaacaacacttgcttgagcaggtcccgtgaccaagggtccgcctcggcaatcaacacacggggtacagcgggtaaatcaacagcagtcatccagcacgctccatcggcaatgctgcaaccttagtcaatcgagcctcctacgtacaatgaacagggcctgaatgtgcggcaatgggcataaaaaaacccgccgaagcgggttttttctgtcgatcaggtcagcctccgcttacagctcggagaagcactcttcgatgatcgccaggcctttgtccagttgctcgtccggcgaggtcagcggaaccagcacgcgcaacacgttgccgtaggtaccgcagctcagcaggatcaggcccttgtcacgcgccttggccaccacggaggcaacggctgcagcgtttggcttgtgcttgtcgccaccttcgaacagctcgaccgcgatcatcgcgcccagggcacgcacttcaccgatcaccgggtatttggcctggatagctttcaggccggtgaccagacgctcgccgacagccttgcagcggtccagcaggtgctcctcttcgaacacttccatcacggccagggccgcggcgcaagcgatcgggctaccggcgtaggtgccgcccaggccgcctggcgcgatggcgtccatgtactcggccttgccgcacacaccggccagcgggaagccgccggcaatggatttggcgaaggtggtcaggtcggcggcaacgcccatctgttccatggcgaagaaggtgcccgtacggccggcaccggtttgcacttcgtcggcgatcagcaggatgccgtgcttgtcgcacagctcacgcaggcgcttcatgaaggatttaggcgcgacgtagaaaccgccctcgccctgcaccggctcgatgatgatggcagcgatatcacgcggctcggcatcgttcttgaagatgcgttcgatgctggcgatggagtcgtcgtcgctcacaccgtgcagttcgttcgggaacagcgcgcggaacacgccgcctggcatcaggcccatgccggccgagtaaggcacgactttaccggtcaggcccagggtcatcatggtgcggccgtggtaagcgccggtgaaggcgatcacgccggcgcggccagtggcggcgcgggcgattttcacggcgttttcgacggcttcggaaccggtggtgaccagcagggttttcttggcgaaatcacccgggaccttggcgttaactttttcgcacagctcaacgtaaggctcgtaggccagtacctggaagcaggtgtgagtcagcttgttcagttgctcggtcacggccgcgatgattttcgggtgcacgtggccggtgttcagcacggcgataccgccggcgaagtcgatgaactcgcgaccttcaacgtcggtcacggtggcgttctttgccgactcggcgaagatcgggtgaatctggccaacaccacgaggtacagcggcttcgcggcgtttcatcagggatgcgttggtcttgctcataaagtcctcattcgccactcatcgggtggcgttgctcaaggaatacgtggcgggaggaaactgcggcagcatgcgatgatcgactgccacagctttcccggccactacgaataacgtcttgaaacacgcaaagggtcagcgctctcgtgccctctgcgtctactgcaatctctcgccgggcggtttagatgcccaggcagaggtatttgatttccaggtagtcctcgatcccgtacttggagccttcacggcccaggcccgaggccttgatgccgccgaacggcgccacttcgttggagatcaacccggtgttgacgccgaccatgccgtattccagggcctcggccacacggaacacacggcccaggtcgcgggcatagaagtaggaagccaggccgaactcagtgtcgttggacatcgcgatcacttcggcttcgtctttgaagcggaacagtggcgcaagcgggccgaaggtttcttccttggcgacagccgcgtctttcggcacgtccaccaggatggtcggctcgaagaagttaccgtcgatgaccttgccgcccgtcagcagcttggcgccttttttcagggcgtcggcgatgtgttcctgcaccttggccacggctttctcgtcgatcagcgggcccgtggtggtgccgtcttccagaccgttgccgatcttgagcttggccaccgcgactttgagtttttcggcgaacgcgtcgtacaccgaatcctggatgtacaggcggttggcgcagacgcaggtctggccgttgttgcggtatttggagatgatcgcgccttcaacggccttatccaggtcggcgtcgtcgaacacgataaagggcgcgttgccgcccagttccagggagactttcttgatgtccttggcgcattcggccatcaactggcgaccgatttcggtcgagccggtgaaggacaacttgcgcacgatagggttactggtcaactcactgccgatgtcaccggcactgccggacactacgctgaacacaccgtttggaataccggcacgctgcgccagctcagccagggcgaaggcggaaaacggcgtttgcgaggcaggcttgagcaccatggtgcaaccggcagccagtgcagggccggctttacgagtgatcatcgcggccgggaagttccacggcgtaatggctgcggtcacgccaatcggctgcttgatcacgatcagacgcttgtccggctggtggcccggaatcacgtcaccgtagacgcgcttggcttcttcggcgaaccactcgataaacgaggcggcgtagacgatttcgcctttggcttcagccagtggcttgccttgttccagggtcatcagacgcgccaggtcttcctggttctcgatgatcagctcgaaccagcggcgcagcttgttcgcgcgctctttggcggtcagtgcacgccaggccggcaaggccttgtcggcagcttcgatggcgcggcgagtttctgcggcgcccatcttcggcacagtgccgagaatttcgcccgtggcagggttgttgaccttgatggtctgaccattgtccgcatcgacccaagcgccatcgataaaggcttgctggcggaacaactgggcatctttaagctgcatgtcggctttccttaacagcaccgcgcgcacgcggagcgaattagagttgttgaaaggcgccttgtgggctgccgtcagggaaatcagccccagcacgcgggatacgtgaaatagcgcacgggagacagagcgtttgaaatctcaaacgaatcctaggatcaatggggggtcagggcaatagtctgttcgaaaaaaagaacgaaaacggcgcatttgccgaatctttctgatcagcgtgattcaaccgggttcaaacaaaccgatcacaggttcccggcgcagggcctctgcgaggcaaattcctacctgtaagcagccaaagaccggcatggacgcccaaggtcgacatgggtatgatgtcgcccgcacaagcatccgtagctcagctggatagagtactgccctccgaaggcaggggtcgtgggttcgaatcccgccgggtgcaccagatacacacaaaaaagccccaggtcgaaagacccggggcttttttgtgggcgctgactcagggcttttgcagtgcctccaggcgcgccggcaggtcttcctggggaaagcgcttgaacagcgccagcagcttctcatccgccaacctggcctgccccgcctcgcgcaggttcacaatttcctgcaacccgtcgtccaaagaaggcaacactgccgctgcgcgtttgctcagctttgccgctggcgcatccgccaaggcgcctgcaatttcagcgtgtgccggcgcgttctccaccttgggcgctgcggccatgcgagccatcggcgcaggcgcggaatacgcttgcggcgcagggcgtgcagcttcttgatggagcgtggagaaggtcgcggtggagatttccggctgcggcacgggtgaacgcaagaccacaccggccagcagcgccacaccggcgacggtggcgaatgccatctgccagcgtgggcgcatgcaggcttgcagccagcgttgccaaaggctcggctgcggcgccggggcttcgcggcgggcggcgttgaggatgagggtgtcgagggccgcaggcggttcgccggtgctgtgttgacgaaagtgttgcaacaatacgtcgtcggaacccggggtgtgtcgggagtcggtcatacaagtatctcctcggccagcaggcggcgcagtttctgctgggcgtaacgcaggcggcttttcacggtttccagcgggctgccggtgagggcggcgatttgcggcacgtcgagttcaccgtgcaggcgcagcaggaatacttcgcgctggtcttcgggcaggtcttgcagcgcggcgtccaggcgcgcctggtcgcggctcaggacgagttgctgctcgggcccggcgctgtcgtcggcctgtgcgtgcagttgttcgtcgtagctgtcgtgcagcgggttatgaatgccgtgcttgcgccagtgatcgatcagacgattgcgggcaatctggaacaaccatgtacgaaaactcgcccgcccctgtggctgggtggtgctgcggatcaggctgagccaggtctcctggtaaacctcttcggccagttcagccttgttgctcagggacaccagaaaccggtacaggccttggcggtgccgtgaatacagcacctcgaacgcggcagcgtcaccggtccggtagcgggccagcagcgcttcgtcactgggtgaatcatctggaacggccatgtcaggtggcgaactcctttcatcaagttaaaaccagtcagtgtgggagctggcttgcctgcgatggcatgcactcagaccaactgatacaccgagttgcctgcatcgcgggcaagcccggctcccacatcacaagatcagtgtttgagactctgcgccaattccaccagttgcacgaactcattgcgcaacccgaacgggtcatcaccacgggccgagcgggccagtgcggcggtttcctgcaagctcatgctgccagtgtagcggccatcgttcttcagttgttgggcgaaggcggccaccgccgccgagaagcgcaggtcgttgctgggcggcgcggattgagtgctgacgggccgctcgatcagttggctcgcgccacctgcagcaggtttgtagcgcacacgcagcattgccagttcaccggacttactttcaaccttcggctcagtagcgtagcgcaacggctccagccagcccttctcacccgtcggcacaatttcgtacagcgcggtcaccgtatgccctgcgtcaatctcgccggcatcgaccttgtcattgttgaaatcctcacgcttcaaggcacggttttcatagccgagcagacgatattcgctgacgcgcgccgggttgaattccacctgcaatttcacgtcccgcgccaccaccgccagggtcgagctgagctggtcgaccagcaccttgcgggcttcgcgcacattgtcgatgtaggcatagttgccgtctcctgcgtcagccagctgttccatcaggtgttcgttgtagttatccacaccaaaaccgagggtggtcagggaaacaccgcttttacgctgctcggcagccatgtgcttgaggctgtcgaagtcgctgatgccaacattgaagtctccgtcggtggccagcaggatgcggttgatgcccttgtcgataaagcctgcacgggccatctgataggccagttcgatgccggatgcgcccgccgttgagccgccggccgtgagctggtcgatggcattgcggattttggttttgtcgcgtccggaggtgggttcgagcaccacacgggattcaccggcgtaaaccaccagcgacacacggtcctggtcccgcagttggtctaccagcaatttcagggtgcttttgaccagcggcaagccttcgcggcggtccatggagccggacacgtccaccaaaaacaccaggttggccggtgcgaggtcggccacggcacggtcagaggccttgatgccaacccgcaggagtcgggtgtgcgggttccacggcgtggcggcgacttcagtggtcacgccaaacggtgaaccgtcggtgggcaacgcgtagctgtagggaaagtaattgaccatttcctccagtcgcacagcgccctcgggcggcaggcggccttgattgaggaagcgtcgtacgttcgcgtaactgccggtgtcgacgtcgacgctaaaggtcgagacaggggtttcggtaacgcgatgcacggggttttccggcaggttttcatactgctcgcgaggctcactacggtactgcatcacggccgattcctgcatgaccagccgcgctgtcataggtgcgggagaggccatgcgtttgctcagcgcgccttggacaggttcgctttgcagctcggagaccggcgcttcttcgaccggtttgggcacatcacgggacgaagacaagccacaacctgccaacgcaaccagcagggtaatggtgaaaccttgggctgcaggacgcaggtacagaaatggacgggacatcggcttaacctcgcgtgtgaatggtgcgctcacaaggtcagacgcaaggcttcgcgcattcgggttaaaaacccgtagtcgagacacgcataccggcgccccccccccgctggaacggtgccggcaacgacacactggacgtctcgggctatatcactgacaaagtcatcaacctcaatgcgggttcgttctctgatgtgggccacgggaggggcagcgtttccatcgcacagacttcctggtgaaaagcacgcacgtgatcaaacccaaagatgttctggtgaactgaaggcacataggtctttgctgaccgggcggcaagacgcaggcgcggaagaagaccgagcgctggcttaacctcgcgagtgaatgatccgctcggcacgtcggacgcgagcgctcgggtaatcgggttcaagataggtgctgcgagaggaaaatggcgcgagccacatcagctaaatccgctcgacgcacagcatcccgcctgggcggacgcaaagtttgatatcaaacagtgcccaggctgataaacaacggcgtcggccctttgaaaacgtcctacatacgtcttacttggatacgtatctccttttggatatcccctctcacgctggcaattttgcacttcgcaaaacggagtttgcctgcttggcccaaaaggaactgatacaaacatcaactggaagttatgacattgagactggattcaatagcccacttacaacctgcgcttgcgggcgtagccctacaaaccagagtgcctgctggccctgtgcccggtcagtctgcccaacctcatcctcctgtacccgctcattcccacaaacaggagagtcatgacgccaccctgcgcgcggacgacccgcatatcgccaagatcaacaagcagtcttttgaccggcagcggatcatcgggcaactcacgcgaatgcaacgaaaatggcaggactcgaaccagaatggcaaaaccgaaattgcctacaccttcaataaaggcaaggacagcttcaacgaggcccaaaagcaaaaagcccggcattcaatgcagtcctggagtgatgtgagcaatctcaccttcaccgagaatggcgtcaccagagaggggcgaatgtccttccggatttccgacaaagagccaaccgcctcagcctattatcccggcaactacctggaagccggcgatagccaatacaacccggcgtacgtgacgcctgacacgctgacccacgaaatcggccacgccctcggcttgagccacccgggtgattaccgattcaacggcatcgatgacaagcgcacgcccgctgactacgcaaaactgcggatctacgctcaggactccaaggctcataccctcatgagctacttgccggaagaatacagtggcaaagccacacacgagccacgggcgccgatgatggatgacatcgacgccatccagcaccaatacggcgccaactatcagacccgcgcgggaaacaccacctacggtttcaattccaacagcgggcgggactactactcactcaaaagctggcgtgatgacgtcactttttgcgtgtgggacggtgccggcaacgacacactggacttctccggctacggcaacaaccaggtcatcaatctcagggcgggctcgttctccgatgtgggcggctataaaggcaacgtctctattgccagggattgcaccatcgaaaatgccattggcggctcaggcgacgatgtgctgatcggtaacgaagccggcaaccgactgattggtggccctggcggcgatcagatgcgcggcgacggcggcgccgatgtttttatctattaccacgctgctgagtccacgcctgaaaacccggatgaaatcatggatttcaccagcggcatcgacaaaatcgacgtggcgggcgccttgagaaatgccggtttgacctcactggctatcgtcaacgcctggagcggcaaggccggtgaaacacgcctttcctacgacgaaaaaaccggcacaggctcagtggcgattgacctgaccggagacggtaaaaccaacctgttgatcaagacccgtgggcaggtcaggcccggcgacatcatccccgcgccggcagcggcgcaaaaaaaacctgtcaccaacaccccggcgccacgcttcaatacaaccggcataaggccgcacttcatcttcaacaaggcaggtgactcaagcgcttccaatgcccggttactgacggactttaccagcggcaccgacaagatcgatctacgcggggtgcaacacgaagccaacacgcgcctcaccctcgtgcaggcatttaccgggcgcgttggggaaacgatggtgaagttcgacgcgaagagtcaccgctactacatcgctgtggacctgactggcaaccgcgatgcggacttcgtggtgaaaagtacgcagctgattaagcccagcgacgtgattgcaggctgactgcgcaagaaacggctgctgaccaaggcgatcagcaaccattatttcggccagtcagtcagtgccgtacttcggattgcgcgggccgtacagaatcccggtgcgttgccccgccgacagcaggcgcgcactggtgataccggcaatcgggtgcgccgcatccgtggagctgttgatcacttgtttgaccgccgcggtgatcagcatgcccaccaggccgccgccgttgttgttgccctcctcgctggaagcgcgcgcggtacctgtccacaaggtggtgccggtgcgcaggtcaaccagtttggcccaggcggtcacggaggtgtcgctggagatcagcatgtacttggtgccgtactcgctgaccgtgatgtacaacgccgcgtctgcgccaaagatgtcatgcagcttgcccggcgccacagcctggatgtcgttggcggtggtcaggccgttctggcggaaggtttcgtccaccagggcaatcggcaacacgtagtaaccggcttcggccaacgggtaagtcacctgcgaaaccaagctgtaggacgcctgaacttccggcgactcattgaccggtggcagtaccaggatcgacttcgggcgcgcttgcttgtacgccgtgtagtcgatggtcttgggcgccgcacaaccgccgagcagagccagcaaggcgccagtgagtttcaacaggttcatttggtggcaactccggtcttggcgtttttcagcagaaagtccatgtacgcagcggactcaggaaacaaggccttctcggtgcgcaactcctgcaccatctggtcatccttgcccatgcccatgtacagcaggcccaaatgggcgtggtaacccggcggagctttgcggccactggcgttgatcttttgcagatcacgctccagtgcttccacctgcgcttccttcggctcgcccttgaagtactcgtaaacctgcggctggtagctttcccactgatacaggggttggggcgccgtgtggcacccggcgaccgttgcgattgctgtcagcatcagcgccaacttcactgccttgttcatccgtgtactgctcctttgggggtggccgatcagttgcgcgggttccaggcgccggcgttgatgccgtctaccaggcggttgatcgcttcgcgcatggccaggtcgagaaccttgccattgagggtggagtcgtagctggcggtgccgccgaagccgatgacttcacggttggacagggcgtattcaccggcgccctgggtggaatacaccacttcggaagtactgatgttgacgatgttcaacgcgactttggcgtaagccacctgggttttgccacggccaagaatgccgaacagttggcggtcgccggtctctttgcggccgaactcggtgacgtcgccagtcaccacgtagtcagcccccttgagcttttgcacggtgcctttgatcgcggcttcctgggagatttcgcccatgttgtcgcggtccagcacgctgaagcggttggtctgctgcaggtgggtgatgaggatggtcttggcctggccgcccaggcggtcaacgccgtcggagaagatgccgcgcatgtagctggagcggttgtcgaacttgcctaccgcaatcggtacgcgtacgcccgagtaggcaacgtgggcgctggcgacttgttccaccggcatcgcacggttgctctcagtggcgcaaccggccacggccagcaacgctgcggcggtgaggcccgacagcaggattttggacagtgttttcacagggtgctcctaaggtgagaaatcagcagttgcagcaggtcggtcagagagatgcaggttatttacgccaccaccgatgcagcggctgtcagacgttgctgaaaaagcgtgcgcaaaggcccacagccacaacatcgaacgtgtcgagccaacaggcaaatgtcttgggaaggatgaccggcgcggggcagttcgctgtgaagcggcaggccgggagaaaagcagagaggcgcatttcttgattcatccatgaaaagaggcatgttgctagtgccgcggcattttacggggttgcccgtcggactcaagcggtttcggtccccacagggatatcgccgcccaacggcggtggcgccccaggcgcggattgtatagcacgctcggataagccatttttactgacacacgccgcctcaaatgtgggagcgggtttacccgcgaagacggcaaaccagccactatctccagcggctgacacaccgctatcgcgggcaagcccgctcccacagggtcaggcggtggatacacatgagcaatcattttcaggcgctgccgctcggcccgattaatagaaaccgtcgctggcagccgccagccaggcagccacccagagatcgaacgcttcgtcacgcgcctgagcctgcaactgcacaatcgcgcgtcgcgcatcggcaatcgaccagcctgtggagttcagcgtcaaccaggcgcaatccagccgccccgacgccaggaagccttcaaatagtgcttgcttgttttgttgcggatcaaaccagcccggcaactcgacacccggcggagcgggcattacctgcaaggcggtttcaaaggaacaactgcgttgccaccagcccggcgcggggttcgaggcgtcaggaaaatcgccgctgtacggcaaggcactgctcggcatgctttcgagcggcgtacgggttttgaatacctcggcagcggcaaacgctgccaggtcatcgcctgcttccagcgacagcacctccaactcggccaggcaatcaagacccactgcactggcgaactgctcaagcaccggggtcacgccgtcgtcaaggctgatggtgcgcatggcgatcaccgcgaagagctgcgcaggggtccgggcaatttcccgggccatacagccgccatctacatacatctccacgaaacacggctcgcgttccacgaaccagtgcttccagtaaccgatgtaggtgggcccgctaccgtcgctccacaccgggctcagcgccggcgggtagacgtaccagtaagcgggtgcttccagggtgcagatgggcactgggatgctgccgtcggcgcacgcggcgagtgcggcaggcaggctcaagaggctgaccgcgcgaacagttcggtcaggctttgagcaaccggctcggcgtattggcgctccatcccgataaaagggacgcgcacaatcggcatggccgcgtcctcagtgtcgaagccatacccctcgcccccaccatccgcaccgaacaggaaaacacccggcgcaagggcttcaacctgatagtcgcgattgaattgcgccagctcctgcacctgccaaaagacgaagtattcctcaccgataaaagcgtagccgccatcgtgttgcttcaggaagtcgagatagtcctgcggcagcgcgacgcccaaagtggcggcgaggctgtcgacaaaggcggcatcggccggggcattcaaccggccttcggtaaagtcatagcgctgcaattttgttgatctcctcggccagaaacctaggagcgggagtgtctgcgtaacgctgggccacgctgaaagggtccaccgtcggcgcccccacgccctcaaacgcaaagccacccacgacataccgggcaaacgcgggcgacgccgggtcctcgtcgaccagccaatatccgtggtagcccaccaccaggcactcgccgatgaagtaaccgatccgcgtaatgaaccaggccctgttttcttcgctgatgaccgcgtcgcggaaaccgctgtccagccgggccagaaattttttgggtgtattcaacacctcatgaggatcctcgaaaccaagggcctcacaaaactcatgcaataccggcaggcgctcgaacctgaaccgctcaaattcggccagcctgcgtgccagcaaggcttggggtgtctcgtcgaatgtttccatgcttgcgtcatcctctgaccgcttcaacgggactcacgcgggtgccggtgaaacacgattacttgagttctttcaccaggtacccgctggaaatctgcgtaatccccgtgagcgcacggcgcaaggcttcagggtcggtgcgataggtatctggcgtgtagccgtagacgttctgaccattgaacggcgtgaccgtttcgaccgtttgccagagcatctcgttgccacggtccatgcgcgccagcacggtgagggtcggatagaccacgctgctgaagccctgggtcagacgaaagccccactccgtcacggtcatctggatctgcgcgtcggcggattcatcgtcgcccaccaccttgagtgaagaggtcttgcccagcgcgtcgataaagttttgtttgagcaacacgcccacatcaatctgctcggcgttgaccagcgcgacaatcgccgtaggcgtcggcaacgcggccaactcgccggccttcatgcccgccgcaaaccccgcgcccgacaatgctgccgtgccaaccctggatgccccggccgccatgccgacgcccgcgccgagcccggcaccgaccgccgcgccccaggcctgctcgcggcccatgtagaccatctgttgcgactcccacttcacgggcaacaccttgacggttttgacctgcgcgcggtgctcgggggtcagaggctggctgacgcagccgccgaggatgagggtggtgaggagtatgaagagaatgtttttcacatcagtcctttaatgtttgaggagtcaaccacgacaacggccgagcaccgggcccggccgtgccaagtgttttcagatcacttgctttctttggccacggtgcccagggacgcatcctttaccagataacggccttcgacatcgctcagcactttaaggctgttgcgcgccacagcgaagcccatttcgacttcctgcttgaggtaaaccacctcaccggccttgacgttgatcggcatgtcggcccagttttcagccttggagctgatcacgtgctggcccggcgtcacgaagaaatagatgtactggttaccgcggttgtaacccatctccgagtcggcttccttgtcatcgaggaacacgttgaagcgcaccatcatcccgacgttgctcgggcgcacaacgtacaccaaacctttgtcggcgacggcagccttgggcaacgaatagttggccacgtcggcctgcatcttctccaccgacggcgtcgaggagcagccgaacagggtggccagggacaatacgacagcagctttgcagaacagcttgatcatgtacttcttccttgtatgtaacggcaaaacggagttgggagcgccggccactgccaggcgcgggagcgttgatgcgttgagtcatcgctaatgtgtcggcaaaggtggcgatgacatgaggcgatattattgtgccactactttagcgccttgcgtgggtttgggtggggggcttatagtcccgcccgtcgcccaaacagggcgatcgggtttggcgatccgataacgagtgcaaaaacgttctgcgtttttttgcaggcttttttgcacctgcagagtcgctgttatggcggctgtgcgcgggagaccttcgggtctgccggttactcgtttccggttcgccaacctgcgtacagctgccacctattcgtttggcgacgatcaggtgatggctcaaaccatcaaaacgaggtttcaaatgaaccaatacatgcccctcacgggtcacgactgcaccgtctccgctttgctcatcgacacccaggcgccccttgacgtcctccacgacgccgccctgttccgcattcgcgccgtcacccaactgctggaaaacctcgccttccgcgaacagctcagcagcgatgccgtagtgcttcaagacttcgcccatttgctggctattccgctgcgcgatgggtgtgatttgctggatgtcatcagtcgcaggctcaatgccgatccaatctgagtaattaaagggtcagaccaccaggctttcaaaattggggctgacccttactccgctgctgagtccgacttatcagtaagcaaacttcgtgctcgcctttccatcacaatcaacaaccacgatcagttttttccaatccccacccgtatgctgcctcatgagttcatgcagtgcatgaacccattcagaagcctcgtcatcagggtcatccaagagttcgctaacaaataaaccctctctgacgaatgaatatttagagcctaccgaccatccgccgacgtaagcctcatagtcaaattcgcagctcaacgcttcatacgggccacgtgccgaacgatgcataatttgcgtgagactgttcaaaatttgtacttgctgctcgatactcatcgcgtttgcctcatttcaagaaaaataggagtcaaaccaccattttgcccaagtattcgcccttcttattatcaaaaaaatgggacagatttatttaaattaaacaaaacacttcaattaaataaatctgtccccttttccgcccttttcctagcccccttttcctaacaagtgacacatgaaagaggaaaatgtgtcatatgacgcttcgcggctcatatctgaggagtctattttaactactatccaatcgttgattatgtcgaatccaatacaggacccctgcatatcgtctccaaagatcaaaatccccttaagagaatctgctgtatccgcatcgaatacatcctcagcgcctaagataccgttgtaaagcataaagcctgccccttctaattccccacatcctacatgcttcaaaaaccaaatataatcttcgggcagtttttcctggcttttccttaaggcttgcagagtaagatcatctacagcagccaagccatttaacaccccttccgtttttttgtttccaatgaatacttggaagtcttgcattattcctcctatttcttattcgaggagatatctcttgctacatctttggagcgatgctgtcaaaaaaggggacagatttatttaaattaaacaaaatacttcaattaaataaatctgcccccttttcctcagacttcagaaatttgagaaacccgggaaaaatgagaatccccagcagctatgttgcaggtaacgcgccgacatcaaaacaattatcatcacttacctcaccatctgccttcagcacctcaaacccacacacacctctattcaaacggatattaatttcgtgaactccatttgagggagggcttataaattcgacttgaagagtataatctccatcagggatttctaaggggataacatccgagacactaccaatttcaatatttttttctttcacggcaaatggaactttaaaagctctcaccacatctgcgctcaactctgaaacttcttcgttgacaaacaaattcattttatgatcaccttcatcaactaaagctctaaaggagacacttcctatccgccaagaaaaaccttgcctgaaactctgatcactccagtcgttatacggttcatcaagagagctcaaaaatacgcacaattgtgaatacgacaaatagatactttcttcaaatttagccatcagtccaccaccttaattctgactttttctccgtctgacagacctcggcaagcattccctatacatgccccagccccatattatctttcacaaaaaagggaacagctttatttaaatcaaacaaaacacttcaattaaataaatccatcctatttttcggtctaaattaaataaatctgcccccttttctacctttttttcctgcgccttcatcaacaccacttctctctcaatcaaatactaataaagtcaaatacctcaacaaatatgcttttaacctctggcaacgcatcaagattggcaagcgcttcatctggggataccggcatatcatagagttcaaatcctcgacggaccgcaatgccgtatagtgcatattcataggcgtcagaatgctcccagtgcggcacatacccaatcaccttatatattttgaagatctcatcattgaagttcatcaaatcaaacaagaaatccggcgcctcactcaatgaaacagcctgagcacaccacgcattgaactcttgcttttctatagctccgcaaaaaagacaagttaatacaaaagcgaataactcatcactataataaccaaccactttaaaattcatcatcacatcccaccccccatcgcttcgccacctatgtgacccgtttttttatgtaccaactcggggaccaattgcattcgcccgctgtcctgatgtaggaaaataggggtcagaccaccaattccctctagtcttttaactcacattttttggacgacctactttaccgaaatagacctttgttccagccggaattacatttttagaaaaccgtggtctgacccctattttcctattcgggagaccgctcaaaaagcatatctaaaaacgctgaaaaagaagaagcaacaaaagatagttcggcatcgctaccgggggatgcttcatgatgccacatcacgacacctggatcttcagactgacggttctcacgataatcaaaacaaagcgcatcgccattacccaacacagaaaaaataattaaaccttgaacaaaatcctcgggtggatgttgatatttcatctccattgtttcaaatgagccctcgatttcaccgaaaggcaaaaacataccggcgctgctcgtgatatcttctccgaggagacgattataaaacttaaaaacgggcttgttcaaaataaacgcaccattaaaccctattgaaacctctttgtatttttcaggaaaaactacgcctgccaatttttcaaaagctgctatttcagcagcatcaccttgaccataatacgaatcaaaacttacgcctgcgatcattttattgccccttgctcatcgattcccacccgacgtggcgcgcaccattatggagaacctcgggaaccagttgcatcctaccggtatcctgatggaggaaaataggggtcagaccactattaatataaagcgtggtctgacccctatttttcactgcttttcgaattgcttttagctgtacgtccgtgaatgcggaacttggaacgactccactatctatctgcgttcgtagttcacgggtcgccatccttaactaaaaaaggggacagatttatttaaattaaacaaaacacttcaattgaataaatctgtccccttttcttgaaactaaaaaaaaacgcaaaaccgtggtctgccccccattttgcactcacggatagacaaagctcgtcttcacctgaccaccgacgttgtaactcatcacaaatgaacgccagttctcaccgcgcgatgcagcactagctttcaattccttgacgagacgatacaatattgccccattaaaatccgtttctggatgatcatttacggccccatttttctctatagaaatttcctccaccatatagccttcacacacctcagtttcgtatctgaaggcatcataatcctcaacaattcccgactgaatcagcgcaaacatattttttacaatttctatatcttcattaatcattctttatgctccggaatcttgcgagcttcattttcaaagcgaacagtttgacgcttaccatcaattgaggaaaataggggtcaggccaccattctttctagtcttttaactcacattttttgggcgtcctgacacaccctgcgaaactcttttgcctaatgcctgcgtgatcgcggatgcaaacttttgatcgcccaaaacgtaattgccgtttgtagaaaatcgaatttattctattaactcaggtgaaagccgatccttgaatatagaccggtacgcttcgactctttgtgcggcgccgctacccaactccttgtaaactgcatgcgggcttataaaacctggtgactcgccctgtgcgtttatcctatagctggtccagtgaaaataggggtcagaccatcactaatataaaccgtggtctgacccctatttccacgttatctccggcatatcaaaaatcgatcttcactgagatacccaacgccccccgcgcgccagaattcgaagtatgagcgaaaatcgaatcccagcgttatcaaaggttgccccatataccacgccaaataatagtcagcagcaacgccataaagcgcctcaaacaatgcatattcttgctctgtcttgagcaaccttgaatcccttacctgatcccccaccagctcaagtatccaactacttggagtatccaatttgtcaaaagacttaaaatcatccttgtcgccgtaaaccagttttgcatgactgcatatttcgtacagttcactgtcgccaagcgatttacaaaaatttgcctgatcttgcaaccaggccttccctttgcgcatcaactcaaagtcggtcgaatcagtggttgggaacaggtacaacctgtcttttagtgtccccacctgaatcacttcgcttatgcgcagcgctagactctcggcatgaggaaaataatgcgtcgctttagtaatctcaggcaaggaagtatgaattttgaacaaagctaaaaaatgcgacttatcaacataagtccgcccttcacagaaagcacaccaatcatctaaaagggatgacattatttccctcctcttggcaaatctggcaaaagagaaggatcgattttccatcgatcgcgcaaagccgttacgcctttattgaattcattaagagatttactgttatcaataacagccttcaattcattgtggaaagcacctgaagcattcccaccgtgtccacccggtactccgtcaatcggattgacccaggtcaattcagatgtctttgttctgaaccgctgaatttcactcattgggacaccccattgtttaaactcgggggcgcgacaaaccatacaccactcatgcaaacctcctggctgtcgaattctcgcttcaatagcctctcgagtagccttattttcccagagaacatctaactcagcaggcgacaggtcgtcaaaccatcgtgtgaaagcgccgttgcgaacagtaggcactctaccgtcgggcacaagctcttgaaacgtccggtcggagtgactgtcactagcaggtgacccggcagatgtcgtttgatgtatcgaacaactccctgcattacaggtataacaaggccccgtgttatgcacccaagtgcttagcttaccgacataaaacgtatgcccaatatccaccgtcaggttatatgtcattccctgcgactgcagcagctttatcgacaccacggagatcgaagcatcttgcgtcgcaccatcccccaacgattgcagctgatcgcccggtttgagctctatcagtggtacaaagcctttgcgcgcagggacgtagaatggatggcccggagtgacttgcaaggtctctgttgtacctccgcctgcagcgccgtttttcaccagagtcagctgataaatcggctggtctgttcgaatgtgggtagcggaaaccttggaggcgaatggctcacctcccttttcaggcttggtccagacgatatcgcccaccttgagcgcatcaatggctcgctcaccatcaggggtggcgaccatcgtccctgcagcaaaacagcatgggctatagccagctaatttcgcctgagcctggttggcaaactgctcagtcccctttccggccgcggcatctatgcctttacctgcaacagactcgagacctttaccagcaaccgtttccgctgccttccctgcaatagcctccgtacccttgaccgccaatacatcccgtgcagccaactctttaatcgcgtttaaaagtgttcccttacccactccaccgacaggcatgagctcagcaagtagcttgagatcaatatttgaattgatgccaccgcccaccaaaacccgaagccggtctatttgctctgcctgggacgcagcgtcagaactgagcgcggcgatctcagggagcttcctgatagccgtaccctctccgtattgctcggcccacgcatcaggcacaacccccataccaccgggttcattgttgtaggtggtgttactcgaaggattgaacagccgcgagtctgtgtactgcttgtctgtagacttgaacgcaacgacctgatccccgttcgcgacaatcgggctaccatctgcccaggtcagaagaactttctcgttttgcagcttagtgatcactccccgcgcaacactcaggtcgtcacccagagcttgcccctcagggtttgtggggctgtagccggcgagaatgccttgtagctcattgttggttttctgatcgacttcgccccccgctacaaatgtcaggagagcatcccactcaaagccagatcggcttttcctcgtggcatctagactcttggcctcttcggccagtcttttctcttcctggacgtgcaacttccggttgtaagactgtgcattcccggcgatttccgaacccatggcgacatcgccattaacactcgccgcagcgagtaaccccaccagcttggatgccgcattgaccagtcgatcatgctctgctggatcactgctactgagcagagatgacttatccaacgtcacgatgagcgcctcattggcgcccgcagcaatcgcccccgtcttaaagtcgccgcccatagcttcagaaagcaacccgcctactacggcgtgcagtgccgttttgcttaggccactgtcctggagtttgtaggcattgccaaaatcaccaacgcctgtgaaagcggtcgcctgcagtacgtcaaaaagactgcccttcatggcgtccttgaagctgccttgtccaagggcttcagaaagcgttccgcgcacggcaccgccggctaattggattgttccaaaacgaccaattgctgccgggtcgttccaatggggcacaacgcttgggccgcttactttgttagttacggggtcgctctgcgcgccgaaccaattgccactggcgtaattcacaaagcctgcggaagcacccgcgatcagcgattgtttcatgctgtcgctgctgaacgtttccttgaatgctgcccccaggttgcctttattgtttatggtgctaacgacgccggtactggcaagcgaggtcaacgaagccgtcgcaatgacgttgcccaacccagccgcagttcctgccactgctgcggtggtcgatgtcgcagcggtagcggcggtcgcggctgccatggtggagccggcacccacagcgctgcctgccgaggcggcaagcgcactggccgctcccgccgtcagcacagtgacaacaataataattgccagcattgcaccttgaccaagactggagtggctgtatttaaaggagtcatgcaactctttcacatgccgccaatccacatccccacgcttctcggcttctttcaaccaagccaactgcggatctgccttgaccatcacatcaatcgtttggctaaccgtgttctgatcaatctgcttaatatcgatcttcagcccatcaacagccttgatcgccaattcgccctgcgccttcagctcactctggcgcaacgtctcgtcggtattacccttacccttggcgctcgtccaagccaggtcgctcttactcttttcgtggctctcttgatgcaggtctttaaccgcttcaaacgtcaccgcgccgccgctggctatcgtcaggtcattaccgctgtagagtttggcgcgctgatacaactggtcgccgccactgacaagcgataagtcaccccccgtcttgatctcagtgccaacgttggtaacgcgagtcacctcatcgcgcttggtctccttcgcgccccagccgcccttctttttcatgtcgtagagggtgtaggtgctgtcctgcgccgccaacaaactcaacttatccccgctatacagataagcctcattccccgcactgatccggctcgccaccagcgtggtgtcacgcccggcctggctgacaaaatccccgcccgccgtgagcacgctggccacttgggtggtctgctcatccgccgtcttgatgcgtttcttgccgtccttttccttgccttcgacgttgtgcatgtcgctgaccgacgccacgttgaagtcgcgcccggcctggatgttcaggtctttaccggccgtggccttgctgccgatgatgttgacgtcctgcccggccttcaggttgatatcgccacccgccgtgacgctggcggcgaggtttttgacgtcggtggtgacggtgtatttttcgccgccgtcgcgggtctcgtgcttgacgcgggtgtcactggcggcgatcaggttgaggtcgcggccggcggtgaggttggcgtctttgccggcggtgagtgcaccgcggttggtgaggtcgcggccggcatccatggcaaggttttcgcgggcgacgatggtgccggcgctggtgtcggtgagggtgcgcatgccggcgccgtcacgtacctggatggcggtgttgtcgttggtgatgtcgcctttgagggcggcgaggctgacctggttgccgcgaatttcgccggccatggcattgcggatgctgtcctgggccagcaggctcaggttgttgccggcttccaccaggccgccggtgtagatgctgccgctgctgacggcggagaggttgttgctggcgcgcagggtgccgacgttgatcaggtcgccgccggtgaccaggttgagatcgcggccctggatcaggctgttgccgcgcacgttgcgtgagtccgcctgggcgagatacagcacgggtacgaggacggtctggccgtcgaccacgcggttttccatccacacgatgtcgtgggtcagcgcactgacttgctggccggtgagcgccacgccaaggctcaggcgcagggcgtctttgctggcgaggccgttgtccatcaggtagcggaactggtcggcgtcgctgtacaggccgcccgccaggaagcgctggccggtttgcgcgagcacggcgtcgcggatcaggcgcgtctcgtattggccatcgcctaggcggcgccaggcgttgtcgctgttgaagccgagtttgccgagcatgtaatcggagctgaaaaagcccgacgcggtggtgaactcggggttggtctcgatcaggtagtggctggtcgggtccggatttttgacgaacaggccgtactcacccttgggcagctggaagttgggcgcggtggtcgggtcgacggcggcgaacggcgtgccggtgtagtccacgggcacgaagccgccgccgggggcgacgctggcgaccggcagcacgctgcctgcggcctgggcgctcgggtcgttggcgtgtttgctcaggctgatgttgatgccgccgacggggatgccggtctggtcatcgccgagggtgccggtgagttgcgccagggtgttttcgtgcaacgtgccgttttgcagggtgcgcgcgacgttgaggttgacggtgccaccagcttgcagtgtggcggcgtagcctgggccgccattgtcggtccaggtggtgacgtcgctcagttggcggaacggttcgctgttgggtgagaggcttttcaaggcctcaaaacgcgccttgtcgaagttgccggccgccgtggcgttgttgaacgcgggcacgtcgatgtactccatgcgttcccacaggtgcttgtcgacgtgccccggtgtgccgatcaccacttggcgctgcccggtgcgggtgcccgcgccctggttcagcaggtcaccggcggtgatgctcaggtcgccgttggcggccagcaggctgtagcggttctgcacgttgtcgccttgcagcaccatgtctttgcccgccaccaggcgcgccgctgccgagtccttgattgccgcttcaaggtaggtttcgttttgggtgatcgtgccgcgccgccagctgtctttctcgccgcagtgctggccgcacacccagctcaagctgccggtggtgagggtttgcgccaattcgaactggtctttggcgttctcgataaagcccgcattgatgccgatggagccttcgctttcaacggtgccggagcggttgctgaacaacaccgccttgccgccgtccacaccggcaaagctcaggttgcccttgctgtacacgtcgccataggcgttgctgaaaccgttgccgcgcagcgtcaggtcgccgccgctgaacagcagcgaatccgcaccgttgttgatgccgttgacggccgtgaggttcaccgcgccctgggcaccgagggtgccacggttggtgatttgtgcggcggcgatatccagttgctggcgcgcggtgaggaacccgaggctgtcgagggtaccggccagtttgacccgggtgttggtggccgccaggcgcccgccattctggctgaggttattggccgccacggtcagggtttgcagggccgacacgcggccagtgttggtcatgtcgccgggggtggtgatgctcaggtcaccgtcgctgagcaattcgccgccgttgttcaggctggccacgtcaaggatcaagcccttgccgctggccatgcggtcgcccgccttgagggtcaggccctgggcgcttttgtaggtgagcacttcattgagttgcacacggcccaggccgtcgacgttgccaaaggcccaatctgccgtgcccatgccattgatgttgccctggctgccggtgaggctgacggtgttgaggtggaacaggcctgaaccggcgtgctgcaactggccgaattggttattcaggctggcagcgtcgaggctgaacgcggtggtgccgaattcgagggtgccgttctggttgttcacttggccgctgagattgaggcggctgctggcaccggtcagggcgcgcagttggccgcctgcgctgttgtcgaggttgccgccgttgaggttcaggccttcattggcttcgatcaggccgcctttgttggtcagggtgtcgcgtgaggtcagggcgagctgtttgccgctgatctggccgcccgcgctgttgtcgagggtgttgccgctgacggtcacctgttctttgccgaacagcttgccaccacggttggccagggcttcgacagtcagttgcaggttgccgaccaggctggccatcaggccgccggcgccgttatctgccgagttggcggtgacggtcagggtgtcgccttgcacggtgccgccggtgttatccaggcggccggtgtccagctgggtgtgcgcgccaccgctgaggatcaggcctttgcggttggacaggtcctggccgctgtagcttacgccctggttgccggcgagtaattggccgccgtcgttgttcaggtgttgcgcggtgatgtccaggcgcttgccgcgcagggtgccgccgctgttgtcgagggtggtcagggctttgaccagaatgctgcgttcaccggcatcgagggtgccgccggcgttggtcagcaggtcgctgacgttgaaggtgatgtcgccgccatcgctgaccaacgcgcctttgttgctgttggtgaaggactgcgcggtcacatccaccgactggccaagcagaatgcccgcgctgttatcaaagcgctcgccgtgcagctgcaacaggccttcgctctgaatgcggccttgagcattgagcaattggcccggcccctggagcaacaggctcacgccttgcgcgccaccggccagcaggcctgcgtcgcggttgtcgaggcttgcagcgcgtacgtcgagttggtcgccgagcacgcggccggcgcggttgtcgatgccgccgccggtcacgtcgagcagcaattgcttgccgacgatcacgccgctttggttgcccaggtttgccgcgtgcagctcgacattgccctgcccggcctgcaggcggccttgggtgttgttgagctgctgggcggtggcgagggtcagcttgccggtgttggcactcagcacaccgttgctgttgttgatcaggcggccagcgctcaggtaaaggtcggtgctggcttgggcgaaaccctgttcgttgttgaaagcattggcgacggtcaggttcagcacaccgctgtcggcctggatcaagcctttgaggctgttgtcgaggtcgccagcattaaccgccagggcagcggctaccaacacgccgttcctgttgttcaagttatctgcgttgaccatcaggttgttggcaatgatttgcccgccattgttgttcagtgccgcgctggtcaacacgaggctgccaccggccatttcaatacggccctggcggttgtccagcgaggcactgttcagcgttgccgcctggccttcaccgaagcgaatcaagccgccaaggttgacgatggctggcgtactgattgccagcgtttgttcgccaaacagccgcgccgtggcgccctgattggtcaggctggccgtgctgacgctgacggttttggcctggatgatgctgccctggttggtcagcgcctgtgcggcggtgatcgccagtgcccggctggccagcaggttgccggtggtgttgacggtctgcgcgttcaccaccaggtcgccggtggcgttgcggctgttgtccggggccacaccggcttcgatgatgccagcgttagtaaggttggccgcgttgagctcgatgcgttggccggccgcgatgctcttctggttgaccaacgcttcggcgctggtgacctgcacattgccggtggcgtagaccttgtcgttcaggttgacgctctgcgcgttgaccctgacgttaccggtggcggcggcttgcgccatgctcaggtggccgttggcatccagctggatgtcgccgccactggcggccagcgtgccgtcgagcttcacgcccacacccgcttcagtgcccaccagtttgatcgcgccagcgtacatgccgcccagggctgacgagtcaatcgccagttccggtttggcactaccgtcatcggcgcgtggggtcgcgttgagggtcttggcatcgacgtcattgcgcccggcgatcaccgccagttcgcgtgcgttgatctgcgcgttgatcttggccgagcgggtgatgatttcaaaacggtcgacgttgctggcgttcaagccttcgccgtcgatggtcacggcgccgccatcgacttggtagcgctgcaactggccgttggcgtcgagcaccggtttgccggtggtcagggtcacgttgggcgtgttgataaagccgcaaccgctgcaggtgatgccgtaagggttggccacgatgaccttggccgactgccccgccacttcggtgtagccgcgcaactggctggggctgccgccgttgacttcgttgaggatgacgctggccgcgccgcccttgaggttggggttgccgacgatgtaaccgccgagctgggtgttggtcaccgcgcccgtggcgttgttgaggatcacgccgttggggccgacgttgtagtccttgaactggttatgggacaaaccactgccattgggcgtggcgatgttcaccaccggcacgccattgccggcctggcccacgctggtggcggggttgctcaccacgatgccttcggcctgggccagcaacggttgccagaacagcgcgttggccaggatcagcaccaggccgcgcttgggcaggccgaagaacgtgtctcgcggcttcagcgcagcagaaggttggcgggccaggaaggcaaagtggcgaacatccattttcaaattctcgttgcggcggggcgttgagttacaggaagaagtccatgcggaagtagatcggcgcttcgcgctcgctcatcactgccgggcgttccagagaatgggcaaacgtcacgctgctgctgacgtatttgccgcgggcgaacagctccagcgagttgctggaaacccggccgtgcacttcgccgttgtagcggccgttgctgatcacgccttggtcgtaaccgacgctggcgccgtattcggcaaaggccgggcgcatccacgcccaagtcaccgggcgcgcccagcgcacgtcgttgcgccagtagccgccgctgtcgccggtgagttgctggtccttgaaaccgcgcaccgaagccgagccgccgaggctcatgcgctgggggctgtacagcacgtcttcgctgcgttgcccggtggccaggctggagaagctgaacgactcgccccacagcgtgaacggctgcaaatagctgacggtggcggtgtacttgcgataacgcgcgttgggcgtgaggttgccctgggggtcgcgctcttgatgattgctttgcgcgtcgaaggcgccgatgccgttttgcatgcccaggtcaatgttgacgaatgaattaccgatccgccgcccgtggttgatgcccagttgcaactcgctcaggcgctggctgctgacgccgaggcgctcatcgttgatgtagttgttggtacgcaggtgcgcaacgccggcgttgagcgaggtcttgctcacgtcgtcgcggtggatcacccgctcggcgcgaaactggtggttttggttgtcgcccgactgcttgaatttgaacgtgtcggcatagcccagagcgcggtaatcactctcgctgtaggtgtaactgaagttccaccagccccacggcacgttgtaatacagcatgctgttctttgaggttttctggtggtcgctgacgccgtcgtggccaccgcgcaacaccagttggtcggccaggcccagcgggctgtcccactcaaggcccgcgccccactgttgttcaccggtgcttttctggccgtcgttgttgcgcgacaggctggcgcgccagggtttttgcggggtgtttttgaccaccacgtcactgccgccgatctggctgccgggggtgagttccatttgcgcctgtttggagggcaggcggttcaattggtccaccagttgctcgacttcgcgcaggttcaacgcctcaccgaccttgcccggaaaggccatggccagttcgcggtcagtcacgctgctgccttcggcgcttttcagggcttcgagtttgccttcgaccaccagcacttgcaggtggccggtggaaaggtcttgttggggcaggtaggcacggctggtgacgcggcctttggcgatgtagtaatcggtgatggtcttgagcaggtcattgagctgcgacacacccaggcattggccgacatagggcttgagcaggcgctcgcggtccggcgccggcaggctgtcggcgccttgcagttgaatgtctttgatggggaagcagcgcgtgtccgcaggcgtggccggggcctggggcttggcttctttgccgggcaggtccttgagttcttcgaggcgacgctgctgttcttcgagcaggcggttctgccggtcgcggatcaggtcttgatcccctggcgtgggagcagcgatggcgctgttcaggcccaggcaaacgagcaggaaagtgcacagcaaataccgagtccgtggcaataacgaagacatgttcgatccatcgaaaatcagggggcggcaaactaacatcgaacttccactgttccaagaaaccgggctagttggactttcgtactagttaattttgcaagccattgatttataactataaataatcatcaaaaagacaggaacggtcttgcgggaattattattccgacaggcggctactgttttgatggcatttcgactaagaacggataattgccattagttggccatcaagttcgtgtcgagataggttagtaccggagatcccggaaaagttcgcgggcgttttgtgaattggatcccatttgtcggtattccggacaacgcggatcaaatctgtgtgctggctcatgtgggagctggcttgcctgcgattgcatcacccagacctgactgacagaccgagccgcccgcatcgcaggcaagccagctcccacatttgaatctctctacccttgcggttctcaaccggcgcctttgtctttttcctgccccggcaccagcgtcagccccgggcgctccacatcacgggatacgtgggatttaacagcttccacaccgccctcttcgtcgttgtggatcaccagcacacccggcttgcgaaactgctcgaggtggccgtcgcccaagttgaaactttcactcaggtgcttgtcactgagcgcattggcctcggcgcggcgttgagcgaacttgcgcccccggcgttgctggtagcgtgcccaactgatcaggatcaccgcgttgaacagggcaatccacaggtaaatctgcagggtattgagcgcggcaaaaatcggcgcttccaggcgcgggccgccatgggtttcgagcattgcgctcatcccgcgcaccagcagccagataagcccggcccacgcgagcaatgtcagcaatacgtcgacaatccacatcacggtgttctggcgagttctgaccagtttcatgatcacgcctcctcttcgcggggtttgatgccgcggtccgggctgacccagcgcgcgcgtttctgatgctggttgaacagcaccttgggaaaactcaccagggtggtgaacaagctgaccagccagaacaccatcgggtaccacacggtccagaacagggttttccacaggtccttctcgtagcgccggtcaatcaagatgctcaccgcaaactgcaacaggcacaccatcgccagcaccaggccggtgaacgccggtggcaccaaagagtccacggcaatcgcctgtggcagcaccatgaatttacccaggccccagaaaattaccgagagcaggaaagtgaaagcccagccggtggacaggcagtattcgaacagcagcggccacaggtagcgatggcgccattgccaaatgccccggatgttcttgaacagcacttcagcgccgccctgggcccagcgcaggcgctgtttccacaggccgccgacggtttcaggcatcaggatccagcacagggcgcggggctcgtagaagatcgcccagtgatcaagttgcagcttccagctcacgtcgatgtcttcggtgatcatgtcggtggaccagtagtcgatacggtccagcgccttcttgcgaaacgccaccaccacacccgacacggtgaagatccgcccgaacacacgctgggtgcgtttgatcaaaccgatgatcgaagagaactcgcccacctgcacccggccaatcaatgtggaacgcgtgcggatacgcgggttgccggtcacggcgcccaggcgcgggttgtcgagcatcggcgcaaccatgtaggccgccgcgtttttatcgagcaaggcatcgccgtcaatgcacaccaggtattcgctgcgtgctgctacggcgcccatgcgcaaggccacggccttgccctggttctgcgccaggtgcagcacgcgcaagcgcggatgttgcagggccagggcatccagcacggcggcggtgttgtctttggaaccgtcgttgaccgcgatcacttcgatgttcgggtacaactggtccagtgctgcgtggatggtctcggcggcgttttccccctcgttgtagcaagggatgatgatcgagatcagcgggttgccggccaaggtcggcgccggagtgtcttccttccacggccagtgacgctcccagtgcagccagaagtacaggccgccggcgatccacaacgccgacatgaacagcgggtagaagaacacgaagtccatcaggaactgcccggtgaccaggaagatcaagccaaggggcacccccagcaccagcgccaacacgaataaagccaggattctgtcgaacatggtcaagggttccattggttggaaagggccggacgtaccgtcttcaggtccggcgagttttccaggaagttgtccgggtagtagccaaaactcctgaccccctggcgtttgagcacacccatccattcggccatctgcgcgccgtcgatattcggcgcatccttggtacgccagtctttggcttgcagctcaaagacggtgcgatacagcgcgtctgggcgggccttgacggtggccaccagtttttccagccaggcgttggagtttttcagcgtctcgccttccatcaacggcatggccatcggcgcggtccagtcgtaggtctggaggaaatcatcgaggttctgtgcgaaccaggcttcgctggccgggttgagcatcggctcggcgaagatattgcgcgcggtctgcacctgcggcccacggatggcgcggaccttgccgatcagttcctgggtgaaatcgatcaggtaacggctcttgaagcgggtccagcgttgcatcaccgccgggtcatcgcgcaatgcggcaatcgtgttcggcaggccgttggcggcataggccttgagcgcggcggggctggcgtcttcgaagtcggagaacaacgcgtcgtcgtggaacagcacgccgtcaatcgaggtattgcgcgccaggtcctcgtagatctcgccgatttgctggcgcactttcggatcaaacggcgacaggcgtttgtactggtccgggtcgatgcccacctggccggttttcgggtcccagcgcgtcacgcgtggcaacgccgggtccagggcaaaactgagcactggcatccacgcatagatcgccacgtggccacgggtgcgcagttgccaggttacgcggttgaacaagtcttgacgcaccggcaggtggcggttggggaagtacagcgagtgcaccaggccgtcacccttggggtcggcgaaggcttgcaggaacacggtgctggcgcccatgtcgaccacgcgctggatcagctggtcgaggttgcgtgcctcttgggccgggtcagggtcgtagacgttgtccaggtccacgtgcagcacgcgcatggaggttcgcgactgggtgccgacgatggcgttggcgtagtgttcgccgtccgggtcggaagccaccaaaaagcgcgggctgctcttgaggttggcgaggtcgtcgaggccgtcgtccagggtcagggccatctggtagccgttttcgcctaccaccgccagcgaagtgccgtcggcagcaccgtacggccacacccatacgcgcggggctttgccggtgaccgcccgcagtttattggtaatggcggtgacgtcggcccgcatgcgcgcctggaactgcgcttcggtttcgtatttgccggtggcggcgtcatagcgacgcgtcgcggcagccggctcgaggttgccttgggggttggccagaatgccggtgtggctggcgtcggtgtgggcggcgatttccaccaggttcgacttggaaatttcgcgcacctgttcccacgtcaggaagtcggaacgggcacgcggcgtgccggcgaagtccaccggtttgttcagcggcgtgtcgatccagtagccgaccggggcaaggatcgccggccagttgtaggcgcgcagaatcggcagcacacgggtgtaaaagctcgaatagccatcgtcgaagctgagcatcaccgctttgggcggcagctcgcgcccaccgctgcgcgcggccaggatctggtcgacgctgaccggttggtagccgttctcgcgcagccaggccagctgttcgatcaaacgctcggtgcgcaccgccaccacggcctggtcggggtcgcgatcctcgacatcgtggtaagcaatccccaggaagtggtttttcggccacggcgcttcacgcacaggtaccgggcgttcggcgggcggcgtgtaaggcgcgggctgctgggcgcaagcgccggcgagcactacacccaggaccaataagcaacggctgagaacagtcatggtcaggctcttctagaaacggtaagtgaggtcgacgagcaggcgcagatcgcgctcgcggtcgccgtcataagggcggctgatcaggctcaggttggcgccgacgtccagtacgtcgttccagcgaaaacgttggccgtaaccgatcaagccgacgcctccggtggagtagtccttctggctatacgtaccggcaccgagctggaactgctgactccactgggtttcgtagcggcgataaagcacatggttgaccgtgacggtgggcaacacgctgaggtcagacttggggttgaagtacaccgtgtcttctttggtgttgcggctggcgccgacttccaggcccaggtccacttgcacatgaggcgagctgtagatgccctggcggccggtgagcaaggcttcgagccggttgttgccgtcgctgaaatgcgacgggctcaacgacagtttccactcgcggctttcgttctggcgccagcggataaaaccgctgccgccgttggcggtgacgtcggcattcagcgcgcgcaatggcgtagtggtcaggagatagccgaggctgccgccgtactgccaattgtcattgatgtcgcgggcaatcgacaccgacgcaccttgcttggagccatagccgtaggaatggttggagacttcggcttcaagggtcatgtcgcgggtgcgccgctccacaccgacacgctgccagcgatgctggccagtgccttcagtgaagtctgcggtggcgtaaccggcaccggcgaacaggcgccagtcttcatcgataggcggcgtatagagcacgctttcaatgccccagtcacggctgccggcaaccgcaccggcatcgttgttattaccgccgccgtagcttttgccggtgtaggcctcgacgcgcaattcagccatgtcgtgcacatcgcgcaggcggctgaggcgttgcacttggcggttgtccgggttgcgcgcgagcacgtcgtcggtcagggcatccatctggcgccattcctgaaggtccatggcggtgtaggcctgggacacttccaggccaatgtctcgcggggcctgggcttcagtttccttgagcgtgccttcggcgcgccgtggcaggtcgcgggcgcggtacatatcggcctgggccaggcgcaggccgacattgcccggcgccttggccaccaaggcttccaggccggtttcgctgcccggcagatcgccgccgtaggtgccggcctgggccgacagctgctgggcgtccatccaattgtcgttggggttgccgatcggcaggcctttgagttccacccgcgggttctgacttttcgccaagtcgttggccacggtgcgagcttcgtccactttgtcgctttcgagcagggcgtaaaacagtgcggtgctgtcatcgacgcggtagctggcgtcggcatccggcgcggccagtacctggcgatacagcggctcggcctgttccggctggcgctggtcaaggtaagaggcggcgacccagcgcagcgcgtaggtgggcaattgcacgccttcgccgttgagggtctggtattcgcggatcacgtcagcggtgcgcgcccgggctttgagcgcacccagacggtcgatgcgccagcgcaccacgtcgtcgtgggcactggcgtccggggtccagcgggcgagcagtgtgtcgtagtcggcgagggcacggtcggcgaccacgtagcgctctttttcagtacgcgtggcgaactcggccatgcgcacgcgctcggcagcgaggtcgccttccaggcggcgctgagtcacggcatcgagtacgccgggatgtttggccgacaggcgcaacgccggttccggcaagcgcgccttttgcagcgcgacgatgtattcacgcaccacttcgggtttgtcgcccgcgcggataaacgcttggtcgaattcgaagagcgcgtcgtaattcaggccggcccgggtcagcgcataaccgagggccatgcggcggttcgggtcgttggggttggcggccaccagcgcgcgggtgcgttgcaccgcttcgttggtctggccgccgtcggcctgggtcagggcctggcccaattgcaggtcgatattattcggctcacgcagcaacgcctgccggtaaaccgccagggcttggggccactgcttttgattgcgataggtgcgcgccaccgtggcgagcgcttgggtggtcaggttgcgatttttgccttgggcctcatacaccttcagcacttcggcgtcttgcccggcccagccggcaatcaccagatgatcgctgatctgccccggtgtcaggcgctccgcaggcagttggcgcagttgagtgagggctggcgtgaaattgccattacgcgcctggatgatcagggcgtcgtaagcggggtcggccagggcgaaagcgggcaccagcagttggctgcacaaagctgccccgatgagcagtcgcaaccgacctgaagcactgatgggtagggttcgcaacatatcgtgagcttccttacacacggaaagctgtaacgataggtggtcctgagcaatttgcatcagggtgccggcgtctagtgacccggcctagctttccttgtaggaactatcccttaggaaagtaggggaatgcacaattcggaacaattgttcagaattggcaggagggcttaaacacaaacaaatgtgggagctggcttgcctgctcccacagggttcagcggttgggcaattagtgtgcgccgctgactgcaccggctttggccatgatgaagctgaggaactgctcgacggtcattttctggccgttgaacgtcacttcattgttggcgtagtgcaacttggacactacgtcggtgccgaccagcgtcgccagctgagtgccaaccgccatgccgctgaccatttcagccgccatctgggattgctgctcgatggctttagggtcggtcacgccgcccatttgcgcttgcaagccggctacgtcgccaatcattggcttggacagggtcaggttggcatccagcagcgcaaccatttgcttgcccaattcaaccggcggcagctccatggaggctggcttggccaggtccaggatcaagctgaacttgctttcgccatgggtggttttcagcgacaggttttccaaagccacctgcggcttggcggccagcgcctggttcacgttggcttcggccagggtctgctcggcttcggtcagttgcagctcaggcaccggttggccggcagcggcggcggcttgcaccggctgcattttttcctggtagagcttggtcagcaccagcatcgacgggatgtcgacgttcttcatgctcacggccatggccgcggagcccaccggcttaccctggtaaccaatttcgtcgatcttgtagtcgacgcggccggccaggttgttgtctttggtctcgctggtgtctttctgttcaaaacccttgaacgtcagcacggatttctgcgggccaaaggtgaccttggtgtcagtcagctcaacggtgttctgcccggtgtagaaaccaaaggtggatttttccaggttgctggcaatggtcaggcctgccagctcagcttcgaacgccgcaccgtcggcatcgactgccgacaccttgaggctgttcatgaagccctcagccttgaccttctggccttcggccgtgctgtcgaagtccaggttggcaccgctgaagctcaccgcagccttgtcgtccttgatctccaggggcagcagttcgacgttgccgttgaccgaacggttgtaaccgatgttggccacgcccttgagcggcgacacgtctttgctggcggcgaaccatttttcagtggtggcgttcttttccagggcgtagtgactggtggccatcaccggcagccatttcagcgacaccaggcgcgagaacggcagcgggccgtgttcgatatggtcaacaaacagcaattcggggttcgggttgccttcaccgaacacactgccctgccctttgaggcggtagtgggcagtactgctgaacaggccacggtcgagggacaccagctcaaggcttgcggtgccatcgacaccggccatggaggtctgcagttctttgttggcattctggatcgcggtctgcaggaccggttccagttgcttgccggtgtaccaggcaccgcccgcactgacggcgccgatggcgacaacaaaacccaagaaaacaacggctggcttattcatgaagtgacctgatcaaatcctgtgagaagtgggctgtcttccttgaaccctgaggggggttggctcaagcccgccgaaaacgggggaagattagcactggcggccgctgacggcccagttttctcagagtggtcacgccgcacttcgttcacgaatactcggtttcaatctcatcgagttgatgatcaaaactctttaaacgtgccgtccaggtgtacaccagcacctcaaactcgcggtggatcacggcgttgcccggtgtgtcggctttgggattgcagaagtccagttgatagcgctcgcgcgccatctggttggccacgtcggacaattcccgcgcgttgttcagccaatgcctgccgtccgcgacctgcttgtcgagcaacacacactgttttttcagcgcttcgaggcttttttccagtggcgtgccggtgagttcgcccatgacttcctgaaacgttcgcccgggctgccagtaactgccccagaaataacggtcgaacacggtttcaacgcggcgcagtgcaaccttggtgtcccagatcgccaggcgcgtcttgccttgttcgagcaaacgctttttcacccgttggttttgataggacgcccaggccaccacgccgatggacaaggtgccgatcaccaggcaagcgctgtcgagaaacaccatggccttgtcgatttggtgagcgagcatgacgccgtagaaataggcagccgataacaacaccagtgcgaagaacacgcaccagaaagcgggagcataagggtttttcattattggaatccccatgagcaaacgcgagcagtgtcaggtgaagcgtcacggcgcctcacctgacaaagcatagcgtttcgctcagggtttgccgggctgtgacgcttgcgttcgtccgctttcccagccaccgcccaatgccaggaacagatcgatctggctcatggctacctgagtgttcgccgccgccagctgcgcgcgcacgtcggtgtaggtgcgagtggcttgcaggtcggccaggaacgatgcgcggccagcctggaagaagcgatgggtctggcctgcggcctccttggccgactcgccggcgtcagcgagtgcgtcacggcgttgcagctgggcggtgtactgcgccaggcccgtctgggtttcgcgaatagcgttgagcaccacgccatcgaaatgcgccagagcgccctgggtcgcggcttcagcttcgtggatgcgcgcgcgggcgccgttggtcggcacggtccaactgatcaacgggccaaagccccaacggttcgtggcgggtgtgcccaaatcatccaggataccgacggtgcccaccgtcgcgccgatgctgatgtccgggtacaacgcgccggtggccacgccgatacgcgcggtggcggcggccaattggcgttcagcctggcgcacgtcggggcggcgtttgagcaacgccgcaccgtcacccacgggcagcaattgggcgatgtgtggcagttcggcgcaggtgccggtgcccgccggcaattgatccagcggcttggccagcaacatcgacaggcggaacaacccggcctgacgcgcggcttcgtagcgcggcatgtcggcgcgcagggatttgtattgggtttgcgagcgggtgacctgggtttcatcgccacgcccggcgtcgcgcaggcgctgggtcagttctgtgctctgggcttgcaggccgagggattcgttggcaatcgccaactcctcgttggccgcgcagacctgggtgtaagagcgcaccacgtcggccaccagggtgatgcgtgcgatatcggcggccgcctgggcggcgtcggcactggcatgggcgctttcgatgccacgctgcaaggtaccgaacaggtcgaactgataagacgtggtaatgctggcactgccgatgttcgccaccggcaccttttccgtgagcagataggcttcgccggattcctgcaggcgctgggcttcagccttggcaccgacgctccagccgcctgccgattcggcctgttcagtctggaaacgcgcgcgctgcaggttggcggccgccacacgcaggtcggtgttggaggccatggcctggcgcaccagctcatccaggcgcgggtcgttgtaaagcttccaccaatcggccggcaccggcgccgacaccacgttgctgccctctcccgcgagctggccttgcaggtcgccacggttcacggcggattgttccggcaatttgtagtccgggcccacggcctggcaggcagacagcatcagccccagcgcagcggtcaccacaagccgcttcatggcttgtctccgtctttaaccttatcggcgatgatcgacacagtggccgtacgcccggcaatcatgcggaagtccgccggcacctcatcaaaggcgatgcgcaccggaatccgctgggccagccgcacccagctgaacgccgggttgacgttgggcagcaggttggagccgctgctgcggtcgcggtcttcgataccggcgacgatgctctgcacatggccgcgcaggcgcgcgttgtcgccgatcacgcggatgtccacgcccatgccgacgtggatgccgtcgagcttggtctcttcgaaataaccgtcgatgtggaaggagttgctgtccaccaccgacagcaccggccgcccggccgtgacgaattcctgggcacgcggcgcgcggtcgttgacgtagccgtccaccgggctgcggaccaccgaacggtcgaggttgagctgggccgaatccacggtcacctgcgcttcggccagggccgattgggcgcgggccacgcgggactggctttcttccagttgctcgctcggcaccaggttgcccaggccacggttgcgcttgtactcgcggttggcctgggccagggtttcctggcggtcggccacagcggcctgggcctggcgcagggccagcttgaagcggtcctggtcgacggcgaacagcacctggcctttggtcacgagctggttgtcgcgcacgtccacctgctggatcaacccggacacatccggggcgatctgcacgatgtcggcacggatatgaccgtcacgggtccagggcgcaaacatgtagtacatgaccatgcgccacacaacgacgaccgcaaacgtcacgatcaacaacgtgaggacaacacggccgatggtcaaaaaaggttttttcatgtcatcaggtatcgactgagtgagtccaccgcgccgagcaacagcgcgtagagccccacattgaacaatgcccggtgccagaccaggcgatagaagtgaatgcgcgtcaacagcccgtgcaccaccagaaacaacacatacgtaatgcccatcagcaccagcagcgtgggcaggaacaccccactgatatccagatcaccgatcataaaggcgctccatcaggcagcggcgcttccagctcggggccgccaataaattccacgccgggcaacaacgacaggcgcaagccggccagtgcgtgcaacagatgcaggcgggtttcgtcttcgttttgcaggccctggccgttgagggcgcggcgcgtgcggtccagggtcatcagcagaccgctcggcgcgggcaagcgttcacctgccttgaggcaggccttgaagtaaccgccgacgccttccacgacctggttgagcaacacgcgcggcacgccgtagatgcgtggcgcgtaagccagcaagtcgagcaggttcagcgccacacgcaaatcgcgcagggcggtgccagtgtcctggttgatcaaggccagacgcggcaggtgctgcatcaggcggtcgagcatttgcacggccatgtgccggtgttcggccaatgtcgcaggctcggtcaggctgacgatgtcgcgccagctgaaacgggtcaggcgcttggcggccaattcagcgccgaagggccgcgcgatcaacgtccagataaaggcaaacagcaagcccacgggcccggccaggttaacgttggcgaagttcaggaagtccgcgtcgtaggcgccctggatgctgatgaacgacgaggtgttcaccagcgtcagcagcatgccgaggtaaaagcgcggctgcacggtgagcgtgccgatgcagataaacggcacggcgaacgccagcaccagcatcgggaaatcgtgcaggttgggcagcaccagaaacagataaaggctggcgagcaacaccgacatggcggtccagaaaaagaaccggtagatctgcggcgcggggtcgtccatcgaggcaaaaaagctgcaggccacggcggccaaaatgaccgcgctgccgccgtcggtccagcccagcagaatccacagcactgaagcgacgatgatcgcggtcaccgtggaaaacgccgagtagaacatcaggccacggtcgaggaatggcgtgagccggcccaggcgccagtggcggtagacggcgcgccaggtgtcctggctttcgcactgaatggcggcttgcaggctgcggcagtcctgccacagatcgatccactcgccgaggcgatacagcgcgttggagaacagcagcgtgtggcggtcatccagcgcttcgccctggggttgcagggcatcgacttggtcacgcaaggcgcgccagctgtccatcggcgcgctgtcctgggtgttctccagccattgggcagtggccagcaaaatcggctccatgtgctcaagaaactccggcgcacggtgctcaatggcatacagcgcatcgtcgagcgcatccaccaccggcagcaggtgaatcatgcgcccgcgcaactccttggtattacgcacggtctgcggccgcgcgccttcgtggggcaactggccgatcatcaattcgagggtgttgaaggtcgcgaccatgccgccgcgcagcgtactgatttcttcggtgtccacgttgcgcgtcaaaaagcgctggctgtagacctgggcgtcggcaaaccacttggccaccgagccgtcgaacaccggcatcaggcggcgcggccagaacatcgcgccaaccacggccgccacggcgatgccgaggaagatttcttcggtgcgcgcttcggcgacgtcccacaccgccaacgggttatccaccaccggcagggcgatcagcggcaaggtgtagcccgccagcatcagcgcatagctgttggcggtacgcaggtgcagcgacaaaaacaacagcgtgccggtccacagcgcaatgatcacgaccagcacgtaaggcgtctggatgaacatcggcacaaaaaacacggccgccgccgcgcccatgaaggtgccgatggcgcggtacaacgccttggaactggtggggccgacaaacgggctggaaacgatatacacggtggccatcgcccaatacggacgcggcatttgcatgagcatggcgatgtacaaagcgatcatcgacgctgcgaaggtacgcacgccgtagaaccagtcttttgcaggcggcatgccggtgaaaaagccgttcaagaggtcatcacctcggccgcctcgaaggcgcgcagtacgcgcaacgcggcttccagatcgctgtgggcaatgtcggccagcacttcctggcgcaggcgcaccagttgcacttccaccgcttgcaccaactcgcggccacgctcagtgaggctcaaggccttggcgcggcggtcgtgcacgtcttcggtacgacacacataaccgccggcgcacaactggtcgagcaggcgcaccagcgacgggctttccatcccggaagcctgggccactttcacctgatgcacgccatcgcccaaacggccgatcatcaacaacggcacggcgcaggcttcggagatgccatagctcaccagcgtggtctggcagattttgcgccagttacgggcgcccaccaccatgctgctgctgaggttcatctggagctgttcgagggtctgaggcactggatagttcgcatacagttagtttgctaactatcaatatggtggatggatccaatgtcgtcaagttttgatacaaatttgtgatgggtggtggggcggtgtagataagtaaagcgggtttgagcgcaagcgtcggatcaagccacctttattcgctcatcgcccgcgccgcctcctcctcaataaacccaaacacctcctccggcacgctgtactgaaactgcttgcgccggtgcttggaaagcttgccttcattatcgaggcacatcatcaccagcttcgacaaatcactgccccgcacgtcgtagcgctggttcacggccttgatcacacggtcgtagcggtcgagaaattcggtttcttcacgcagttccacttccagcgcgtggcgggccatttgcagggtgaattcgacgcagcgagtggcgtcccagtagcggtagatcgacgggtggccgaagaattcgaaggtcatttggtcaccgtccaaccacgtgacgttccagaagtcccgtatcggccgggagaaggttttaagagcatccagataggtttgttcttcgtgtttcatcgcgacagaaaccggcagcaacaaaccgttttccaatgcgccgtagtgacagagcgtctggtggatcagaaagcgtgacaagcgcccgttgccatccatgaaggggtgcaggaatacaaacccgaaggcagtgacagcggctgcaacgagcgggtcaacctcgcgctcgggcaaattggcgaaagccatcaactcttccatcagctcttggcacagctcaggcgctggcggcacataactgacgcccgcggctccgcgcaggccgttgtgcagatagttttgttcgtggcggaatgcgacggctttgtcaaaaggattggagacagtgctgttttgcagctctaccagatagtcctcggtcagcagccgcccttcatgagcctggcgtagcagctggacgaaacgacgggacttttcttcgctgggttgctctttttcgatggcgaacgaatcacgggtttcatggagataggcccattgtatggcgcggtccatcatttcaggtgcaagggtcgccatgaaggacctggcgcggcccaaaatgtccaggctcagcagggcttcgatttcaggtgttcgctcaacagtcgcgcaataagccaaagtgccaaggccgttgaagtcgatacgccaacgggaattacgcgtagaaggccctgtcacgtagcgttgaggatcaaacagaggtgacacgcggctgttgatcggcttgttgtaatccagccgttgaagggtcaagccctcccacagatagcaagccttgcggatgaatacaccgttgggggctcttgccagctcttgcagcaattggtctgcactgaccgattcaagtgcctgagccaggatgccaaggttgataccttcatgtttgagggcaaaaagaatgtggtcgagcactgaatcggctgaaggcgcaacagtgtggggaacagccaggcagtcaccgattatcgagacccgcgtaacgggcttgaccatcgcagcacgaaggggggcaatcgcctttagcccaaggcattggtgaagatgggcataaccaaccagagacatcgcgtagcctcagaaaaaactcacttacgcgattaaagcccagtttttttcaaccaacacccgattttttcaatttttcatgtttccgctaatttttttgcacccctctgccactgtgtagaaggagattcaactcatccaccacctcggcccaatccgcgtcctcgagtatttcactgcgtaaaaacttcttctggttctcggtccagaaaaacgcatcagccagatgcaactccggcttgagcggcgaatgcaccgccacaaacttctcaatactcaccggatcatccggcagcccaagctgtttgaagagggacggcaagctgtgcacaggcgattccatggcgggctcctggaaagatggctaactcgagtctagcccaggcgccagccacgccaacaaccgctcgacgcactgctgcgccgacagcacgccggtatccagcaccagtgaggcgtgcggcggtggctcgtagggcgagccgatgccggtgaatcccggcaactcgccccggcgcgcgcgggcgtaatgccctttggggtcgcgccgctcgcacaccgccagtgatgcgctgcaccagacctcccgatagtcaccgcccaggcgctcggcaaatagtgcgcgcagttcaaccagcggcgcgatcatcgccaggatcacgatttggccgttttccaccaataacgccgccagttcgctggcgcggcggatgttttccaggcggtcgctgtcggcgaagcccaagtctttgttgaggccaccgcgcaaggcgtcgccatcgagtaccaggccttgccggccttgttcgaacagcgccgcctgcagcccttgagccaaggtggatttgcccgaggcaggcaagcccgtaagcaggatcgccacgccgcgatgcccgttgcgcgcttcgcgctggcggcgagtgatgctcgccgtcggcgctatcaggttacttggcgacggcacggggcaccggcgcggtgatgttgcccgctgcccacgccgattcacggctggcgagtgccgtggcaatcgattgcacgcggtcggaatccagctgttcgggcagcgggtcgagcccggcgctggcgaatatctggccgtaagcgttacgcaggtcggcgtaggccaggtcacggcgcaggtcggcttgcagggtgttgagttcgccctggatcaggtcgagttcgcccaggccggccgcttcatggcggttgcgcaattgagtgaggatttgcccgtcgatgttcgccagttgctcgttggtcttgaactggcgcacggcgtcctggtagttggcgttggccacgtagatctgcgccagcaccgcaatcgacatcgcctgacggcgcgcggtggcgacttcttcaccggccttggcgacgtcgatggccgccggcgcggagatcacgttgaacaggttccaggtgaccttggcgccgtagtcggcccagcggttgtccaccaggaaggagttgctgtcgtaatgcccaccggccgaaaactccaggcccggtagcaggcgcagcatggctttgcgggtttcggcggcgctgatgcgggtctggtaatcctgctcacgcagctcggggcggttggccagagcttcctgttccaggctggccaggttgaccttcaattgcggcacgctgtagtcgtcaggcgttgccagcttgacgtcggtgcccatgggcaggttgatcagggtcgccagctcggtcttggccagggacaacgcgcggcgctgctcctgcaattggcgtgtggcttcgatcagcgagcgctggtaaccgagggcctgcaccgggtcaccgatgcgctgctcactcatgctttggctgttggtctgggccctgtcaacgcgcgccatcaggctgtcgatctgggtcagcaaacgttcggccgccacggcgcgccaataggccgagcgcacgtcctgcacgatggtgttgatcaccttgcgacggcgctcctgaatgatcagccgctgatcgccctgttgtttggcgctgatgtagctcacgccaaagtcgagcacgttccacaccatggtcaagtccgccacccggcggtcgcggtcctgggaggtcgacggttccagagactggttgccactgagcacgctctggctgctggaggcgttggtgttgttgcgcccggcgtaacctgccgacagcgccatgcgcggcagcatgtcaaagcttgagaggtcggactggcgcttggccaacgcctcttccatcaccttcaaacggccttcgaggttgtatttcactgcgcgggccatggcctggtgcagtgtcaacgggccgctcagcggctcctggtccttgtacatgccttgcagatcgctgcgggctcgctgctcactgacactgcgctcaatcggctcgctggtgaccgcacaaccactgatcgccagcgccagcaagctggcgccgaacaacttctgacttgttttcatccttggactgcccctgttcctgcgccttgagtggtgtgtattcaagcctgcatttcgctgatgccgacctgttgcagtgcgtgcgccaggtcaatcacctggcgttgttcggtgtctttgatgtgctgcaattgctggcccagggtcggcgcgccaaagacgccacgcagcccgtgggccgggtcgccctggcctttgatcgatttagtgtcgaacgccttgaggccgctgtcttcgccaccgttttcgcggttgaacaggcccgacagggtgcttgagccaaacactccgccatcaccgccgccaaagcccaggaagcctttgccgctgccgtcgccactgccatcggtgctgaacacctgggcgataaaactgggcgccgatgcaccgttgtgaataaagatgctgccgaccggcggcaaatctgcccccacctcacgcagcgggaacagcggcgggaagccgatcggcgagccgaggttgcccgtgggctggccaaagatgattggctgcagcggcaggttcgtcgaaacctgcggcgccaccgggtcagtgacgcggaacagcgggtcaccggtcagcgaaaccgtattgatcgagaagttgttggagttggcgtaaccactgcccgcgttgcccgacagatcattcaccaggctcgtatcgagggtgatgaagttgctcgggtcattgaggttggccgcaggcgtcagggtggccgtccaggtcttgccgccatctgttgtggccaggttagacagactgccgttggccacgctcaggtcatccaggtcgaacccgctgactttctcactgaacgtgaaggtgaccgtggtggtctggccgacggtcaggtttgggttagcgatgctgatcgttgcactcgggcgctcaccatcaatggcgtagttgttggagattgcaatgccgctgccagcgttcccggcggtgtcattgacctggccggcatccagcacgatcaggttagtcgcgtcggtaatggccgccgtcggggtcaacgtggcggtccaggttttgccgccgtccgcgctggccagattggacaacacgccgttggccacactcaggtccgagaggtcgaaaccgctcaccgcttcgctgaacgcgatggtcacggtggtggtctgcccgatgcccagcgtgccgttggccacggaaatggtcgcggtaggccgctgagtgtcgacggcgtaatggtttgagtcggtggtgccgctgcccgtattgccggccgcgtcctgcacaccgctgttgtccagcgtgattaggttgctggtgtcggtgatgttggccgtgggcgtgagggtcgcggtccaggtcacgccgccgtcgctggaggccaggttgctcaagctgccgttggccacgctgaggtcgtcggtggtgaaaccgctgacggcctcggagaaggtgatggtgacttgggcggtttcgccgattttcagggcgccatggtcgacgaccaccgtcgcggttggccgctgcgtgtcgatactgaaattgcccgagtcggggacgccgctgccggcgttacccgcgaggtcgctgacgcccgcgttattcagcgagatcaggttggtggtgtcgtgaaggttggtggctggggtaaaggtcgccgtccacgtgatgccgccgtccgcgctggtcaccgccgacagcgtaccgttaggcacactgaggtcgctgttatcgaaaccggacaccgcttcactgaaggtgatggtgaccacagcggtttggccgatggccaggcttgggctggcaacgttgatagtcgccgtaggccgctggccatcgatcgcgtaattgttggagatcgcaaggctgctgccggcattcccggcggcatcgctgaccccgctggtggccagcacgatcaggttggtggcatcggtaatgtttgccgtcggcgtcagggtggcggtccaggtcttgccgccgtctgcgctggccaggccggacagcacgccattggccacactcaggtccgacaggtcaaaaccgctgacggtttcactgaacgtgatggtgacagtgctggtttgcccgatgctcaaaacgttgtcggccacggaaataatggccgtaggcagctgagtatcaatggcgtagttgttcgaatcggtggtgccgacgccgctgttaccggaaacgttctgcacaccgctattgtcgagggtaatcaggttagtggcgtcggtgacgtcgctggtcggcgtgaacgtggctgtccaggtgacgccgccgtcgctgctgctgaccgccgtcaacgtgccgttggcgatggtcagatcggtgttggtgaaaccggtgaccgcttcactgaaggtgatggtgactgtagacgtttcaccggctttcagtgcggtatccgccaccacgacggttgccgtcggccgcatcgtatcgatggtgaagttgccagagttggtgatgcccgtgccggtgttgccggccaggtcgctgaccccggtgttgttcaggctgatcaggttggtggtgtcgcgaacattgaccgtcggggtaaatatcgccgtccaggtgatgccaccgtccgcactgctcaccgccgtgagcgtgccgttgggcacgctcaggtcgctgttgtcgaagcctgaaaccgcctcgctgaacgtgatggtcaccagggacgtttcacccgcagccacggtcgggtcggcgaccacgatggtggccgtagggcgctggctgtctacggcgtagttgttggagtcggtggtgccgctgccggcgttgcccgccaggtcggcgatgccggtgttgtccagcgtaatcaggttggtggtatcggtgatgcccgcagccggcgtgaaggtcgccgtccaggtaatcccgccatcgctgctgctcaccgcgctcaacgtgccattggcaatcgtcaggtcggcattggtgaagcccgtgacggcttcggagaacgttacggtgaccagtgaggtctggccgacggcgagggcagtgtccgcgaccactatggtggcggtcgggcgctgggtgtcgatcgaataattgttcgagtcggtggtaccgctgccggcgttaccgctcacgttctgcacgccgctattgtccagcgtgatcaggttggtggcgtcggtgatgctggtggtgggcgtgaaggtcgccgtccaggtgatgccgccgtcgctgctgcttacggctgtcaacgtgccgttggcaatggtcaggtcggcgttggtgaaaccggtgaccgcttcgctgaaagtgatagtcaccagcgaggtttcgccgatcttcaggctggggtcggccacgatgatggtggcggtcggcagcacggtgtcgagggtgtagttgggtgagctggtggtacccgtaccggcattgccggccaggtcggcgacccccgtattgttcagcacaatcaggttggtggcatcgttgacccccacattaggggtaaaggtcgctgtccaagtgacgccgccgtcactggaggagacgttactcagtgtaccgttggcgacgctcaggtcggcattgttgaaacctgtcaccgcctcgctgaaggtgatggttaccaacgaggtttcaccggcactgaggtggctgtcggcgagcacgatggttgcggttgggcgctggctgtcgaccgcgtagttgttggagtcggtggtgccgctgcctgcattgcccgcgaggtcggcgacgccggtgttgtccagcgtgatcaggttggtggtatcggtgatacccgctgccggcgtaaacgtcgccgtccacgtaatcccgccatcactgctgctcaccgcgctcagcgtgccgttggcgatggtcaggtcggcgttggtaaaaccggtcaccgcttcactgaaggtgatcgtcaccaggctggtctggccgatggcgagcgcagaatcggcaaccacgatggtggccgtcgggcgcacggtatcgatggcgtagttgttcgaatcggtggtgccgctgccggcgttgccgctcaggttctgcacgccggtattgtccagcgtgatcaggttggtggcgtcagtgatgctggtggtcggggtaaaggtcgccgtccaggtgacgccgccgtcgctgctgcttaccgcgctcagcgtgccgttggcgatggtcaggtcggcattggtaaagccggtgaccgcctcgctgaaagtgatggtgaccagcgaggtctcgccgattttcagcgcgttgtcggcgatgatgatggtggcggtcggcgccacggtgtcgatggtgtagttgttggagttggtcgtgccgctgccggcgttgcccgccaggtcggcgatgccggtattggccagcgaaatgaggttggtcgcgtcgttgacgcccacagtcggggtgaaggtcgccgtccaggtgatgccaccgtcactgctgctcaccgccgtcaatgtaccgttggcaatcgtcaggtcggcgttggtgaaaccggtcaccgcctcgctgaaggtgacggtcaccagcgaggtttcgccggccgtgaggttgctgtcggcgaccacgatggtggcggtcgggcgcacggtatcgatcgcgtaattattcgaatcggtcgtaccgctgccggcgttgccggccaggtcggcgatgccggtgttgtccagggtgatcaggttggtggtgtcagtgatgctggcgctcggcgtgaacgtcgccgtccaggtgatgccgccgtcgctgctgctgattgcgctcaacgtgccattggcgatagtcaaatcggtgttggtcaggccgctgacggcttcgctgaaggtgatggtcaccagcgaggtttcaccgatccgcaggttattgtcggccaccacaatcgttgcggtcggacgcacggtatcgatggcgtagttgttggagtcggtggtaccactgccggcgttgccgttcaggtctgcgatgccggtattgttcagcgtgatcaggttggtggcgtcggtgatgctcgcagtcggcgtgaacgtcgccgtccaggtaatgccgccgtcgctgctgctcaccgcgctcaacgtgccgttggcgatggtcaggtcggcgttggtgaaaccggtgatcgcctcgctgaacgtgatggtgacgagcgaggtttcaccgagtttcagcgcgttgtcggccaccacgatggtcgcggtcgggcgcgcggtgtcgatggcgtagttgttggaattggtggtgccggagccggcgttgccggccaggtcgacgaccccggtgttatccagggtgaccaggttagtggtgtccgtgatgctgctggtcggcgtgagcgtggcggtccaggtaatgccgccgtcactgctgctcagaccgctcagggtgccgttggccacggtcaggtcggcggtggtgaagccgctgaccgcttcgctgaaggtaatggttaccagcgaggtttcacccgccgccaggttggtgtcggccacgacaacggtcgccgtcggccgcacggtatcgaccacgtaattggccgagtcggtggtgccgctgccggcgttgccggccaggtcggcgataccggtgttatccagggtgatcaggttggtggtgtcggtgatgctggcgctcggggtgaacgttccggtccaggtgatgccgccatcgctgctgctcactgccgtcagcgtgccgttggcgatggtcacgtcagcgttggtgaaaccggtcaccgcctcgctgaaggtaaaggtcaccagtgacgtatcgccgatcttcaacgccgtgtcggacatcacgatggtgacggtcggccgtgcggtatcgatcgcatagttgatggaactggtcgtcccaacccccgccacgccgtcgctgatcgcagtgaccccggtgttgtcgagggtaatcaggttggtgctgtcggtaatgttgttggtcggcgtgaaggtcgccgtccaggtcaggccaccgttgctgctgctgaccgctgtcagcgtgccattggcaaccgtcaggtcggcgttggtgaagccggtcaccgctcggctgaaggtgaaggttaccagcgaggtttcgccgattttcagggccgtgtcggccatcacgatggttgcggtcggcggctccacataagcggtattgagcgtgccgccattgttgtagatcgccgcgaacgccaacgggacactgcccgtcacaccgccgcccaactctggaccgcccgcgccgctgccagccgcgttgccgctgatggcactgaagttggcggcggtgatcaataccgtaccgccctggttccagatggcaccgacgccgcgcccgccatcgccgccgttcaggttgttgctgccctggccgctgccgccgccaccgccgccgcccgcaccgatgttattgctgataaccgaggtgccgacgactttcaaggtgcccgtcgaggcgttgtaaatgccgccggctgcgttgccgccgacaccgccaaccttgtcccaaccggacccgccaccgccgccgccaatggaaatagtgccgttgctggccgtgccgccattgccgccgttgctgtaataggacacccccacaccgccggccccgccggtggtggaaccgccgcgcccacccatgtgcgtcgcgtcatagccgccgccgtagccgcctgcgccaccgctgccggcctgcccgcccagcgtaccggtgcccggcccggcggtcccgccgtgaccgccaccctgaccgcccaggccgccaccaccgccaccgccaccgccgtagttggcgcccgtgacaccaccgccgccaccaccgcccgcagcggcattgccggtaaccgaaacgttattcagggtcaggataccggcgttgaaaatcccgccgcccatggcgccggtggccccgtagccgccattgccgccgttgccggaaaccaggccgcgggtgatcaccaggccatccagcgtcaccgtactgccggaagtgatctccaccacccgagtcctgtactgaccatcgagggtgacgtccgcaacgccgtcgttgttcaggtcaccgtcaacggtgatgtttttgttgatcagtaattccgaggtcaactgcaccgtcatgctcgtgccaaaggtcacgatatcgccgttctgcgccgaagccagagccgcgcgcagcgaacccacgccggtgttcgcgttgttggtcgcggtccacgtggccaggccccactggtattcgctcatggctttggtcgacagcacgttggcgctttcgatggtgccggtggcgatttccaggtcccagtcaccgccgacgccggtacggttggtcgaagcggcgacgtcgcggccggtcaattgcgccagggagtcgacaaaattcaacccgcgttcgccttcggcggtgtagcagccgtagatcaaaatgtcgccgcccacgttcatgtctttgccgatctgccccagcaccgcactgcgggcggccacgttgtcggcggacagataggtggtgcccaaccacagatcccccgcattgccatgggcaataatctgcaccgagctgacgccctggtgggtgtccaggtagtcggcaatctgttgcaggccgtccttgctcgcgtccagctgaaccacctgggtgcctggcgccacgccttgcaacaggctcgcggagtccttgacccgtgcgtcgacaaacaccacggtctgccccggcaccgccacgggtgcagcggccggcgcgtcagcctggccgtgggtgtctttgctggcgcccgggtgatcggcgctcggcgctttggccgcgtccgcggtggggtggctgtcgggctgcgccgcgtcggccacggtggccgcgacggcgccgtcgaacagcatgcgcggctccaggtgcatgatcatcggcgaaacccgtgcctttaccgcttcgctgacctgcgacttgcgtttgctccaccacatgctgctcacccggcgtcgaacgttctttgagaaaaatgaaaacgccgcgatcaattgatcgcggcgttggccttcatacgaatcacattggcggcactggctgagccgtcctgccaaaacgacaactcggtgtactgctggaacaggtccggcggcaggatggtgcgccgcgcttgcaggcgtaccttgggctggaccttgtgcaggccggagacgcccagcgcctggtcgaactcgggtgcgtcgtagacgaggttgttgaagtcatgctcgaaccacggttcgccgataaagtcgtacaccaaccgcagcacgcgctccggggcctggctgagcaggtcgtaatcgacgatcaacagcgagtcggcatgttcgccgtaataggcttccttgagcgccgcccatgaaaaacccaccaggcggttgcgctgcgccagggtttcacaccggctgtacaccgtgttgcgctctacatcgtcgccaaacagcttggtgttttcgaaagggttggcgcggtacaggcgctccaggctgtccatgatccaggcgacgttgcgcacacaggcgatgactttggactgggggaacaggtcatgcagcgcgggcatgcgcgcgcaccactggcggttggtgtcgaacaccaccggggtggagggtttgtcggcgtagtaggaatcaaacaggccgcgcaacagacggcgacgggtgttggcatcaatgaccgcgccaaactcgctgccggcgctgcactgcgccagcacgccattgaacaaggtaccgacggggctgctcatgcccgcatgaaaacgcgggttctgcaacaaaatggcagagagcagggtcgagccggaacgcggcagacccgagataaagtgatactgcaatccgttcaccaccttgtaggacaaaaatccatttgtggccgaagcgtagctgaggattgcagagttcactagtggtcatttgccactattttggcatgcgcttaatgccgattcgaaattagcggcagccctctggctgcgagggctctggcccgcgacacagcacaaacaaacgtgcccgcgcgccgccgccgtcctgctgcaaaagttgtttccagccatcgggaatcggcgcgaaatcatccggcatttcattgctgctgatcagccagacgcggcgcgtatccgccggcaatgccgacagacgatcaaggtaaatgcgcccgccatcctggtccaccagcgtgccgaaaccgtaggcgttcggccgggtcggcgtgccgtcgggtttgggcggggtgtaaagctgcaattgagcgtcggtctggtcgtagtacacgtagctgaggtaccacatcatgtcactgagcacgatgcggtcgtcttcctgatagttgcggttgacgaactccaccggcgtattgaattggtcatgcacgtccaccgtggcgttgttcttgagccccagcagctccacgccgacgaacagcacgaacagcgcagccgccagccacgccaggcgcgccggcaggcgatcaatggccagggccacgaggatcggcaaacccatggcgtaaaccgtgaggtagcgctcgataaagaccggcgaaagaaacgacaccgcatacaccagcagcaacggcagcaggaagaacagcgccagcaagcgggccaggtgatggcgctcgcggtcctgccaggcggtgacgatcaccacggcaatcaacagcagcggaaacaaccagaacagtggccgccagaagcccacgccttcatcctgaagcgtgaactgccagatcatcgacggtacggacgtcaacgtgaccgggtcttcccaaccgatatcaccgccgaccttgagctgttcgacgtgctgcaccaggtccagcaggttcggcagccagggcaaatacaacgccacaatcagtgcattggcgcaccaccacgacgggcgcaggatcaggcgctggccggggcgctgggccgggcacaacagccccagataagcccaatgcaccaacacgcacagggcggtgaaatagtgggtatagaagccggcggccatcaacagcacatacaccgccagataacgtgtacgcgccggttggcgcacccagtacaccagcgccagcgtggcacccagcaaccacacggccagcagcgagtacatgcgcacttcctggctgtagcgcacggcagagggaaacagcgccagcaggacactcgccagcaccgcagcgcgccgggtggacaattgccgcgtcagccacacgcccaggcctaccgcgaccacgccgggaatggcgctcatgccgcgaatcgaccagatgccgtcgccgaacagctcgatccagccgcgcagcatgaaaaagtacagcggcgggtgcacatcatgggcggcgtgaaaccacaggtcgtccatggcgtattcactgagcagcaggctggagccttcgtcgccccagattgccgccgccgtcaggccataaaaacgcaccgccatggccagcgccagaatcggcacccaccacaaacggctgagccatccggcgccttcccaggcgtccgagaggcgattgactgcgggaaatgccgccactttgtcgtcttgttctaccacagaccgtcgcacctcaattcccctgaccctgcccgtttttccgggcaaaccttgcacctgcgcaaacaagcgccactctaggacaaaagccccggtttcgctcgctgtttcgcaaccgccaggcggcgcgcaaaagtggcgactacgctctgcgatgacgccagatcacttggcgtcacacaccgtatagccaaccacaaggatgaacgaaccatggaagtattcatcggcaccatccaaccctttgcatttgatttcgccccccgggactgggccctgtgcgccggccaaaccatgcccatcgcccagtaccaggcattgtttgcactgttgggcgtgaattacggcggcaatggcaccacaacctttctgctgcccaacctgcaaggccggatgcccatcggccaaggctccggtgcaggcctgtcaacccgcgtcatcggggaggtctccggaacggaatccgtgaccgctaccctgctcaacctgcctaaccacacgcacgccattacaccgatcaccgttaccacctcggtgcaactggccgtccccgccagcaacccggtgacgttacccactgcgaccaatgcctatatcggtacttccggtgccggcccgggcagtgcttcgatctattccgaccagcagggcgccactccggtccccctcaaaggggtcagcaacaccacgagcggaggcgcgatcacgcccaccggccaaggccagcccatgggcaccatgaatccgttcctggccatcaacttcagcattgccttgaacggaatctttccgtcacgcagctgacctctggccggggcctgagggccccggcactggtgaaacggagccgcccaatgctgaacctggtcaccccggaatacttccggcctttgctggatcgcaccagcgtgctgtacctgcccgacggctcggcgctgccgatccaggtccaaagcctcacggacgcacccaaagccactgttcccggcagcccgcgcggggctttccgtgtgttgttggaaagccttgcgcccacggacttcgttgacggcttgtgccgcttgcctctgacaaacgcctgcctcgaagacgtgtttgtgtcgcgcgagcccgccatgggccgtgacagcgggcgcggttacttctgcatcgtgttcaactgagccgggtaccacgccaagcgctgtgcggcgtgggtctgttcttccacccgaaaccccagcgccaggtaatgctggcgcgcgtgggggttgctcgcccacaccaccgtggtcaccgggcacagtacctgagtggcggcccgctgcacgccttgcagcaccgcgcggccaaaaccctggccgcgtgctgccgggataaacgccaggtacagcacacggatttcattgggcccgaagtcggcactcaaagcgccaatcggcgtgcccagtttttcgatgacgtagtgcagtgcaccgggaaaatgctcgtccatgcccttttcctgaacctggaactgctgggcaatcacctcctccaccagcgcctgctcgccgtcgatccactgcaagtccgcacgagccgagcgataaaggccctgcaaaaacagcccgtcgctgctgcgtgacgggcgtacctccaggcccagcgccatggcaccctgttctttcaacatcgcgttcaactcctgtcagaacccgctttccctcacacccagcgccgccgcgcgccgccaggccacccccagcaccgactcgccgcgcccttgcagcaccaccacaccgcgcagcggctgatggggcgtcgcaatggcttgcaggcttttcatccgtgcgccgtactgcgcctgcaccggctccgggcgctggttttcgtcgcggcgcacggcaatcgggccgtggtggtcggaggtcagcgcctcttgatccagataggccacaccgttggcgtcaatatcggtcagttccaccgcgatggctgcgtgcatcgggtcatcggcgataaaccgcccggtcgcccccggcgccacccgccacagctcggcctcggcgagataaccgcgcaggcgtgcgccgtcttccaccacttgcgccagcgggtccttgggcgacagccagcggcccacgctcagttgtggcagcacatcgcgcaccgtgccggcatggggcgcgcgcaacagcaggcgctcgcgctgggccgccaggccacggtattcggccagggcctgggccaggcgctgatcgttgatgccggtatccgccgccgtttcactgcgccccgcctggcggcgcatctgtagctgcaaaatgtccacttcacggcgcacgatgcgttgtcgcgcatccaggtccggcgactccagttcaatcagcacctggccctgggtcaccacctgcccgtccaccacgcgcagttgcttgacccgcgccgccaccggcgcatgcagtgcgctggcacgtccagcctggagcatggtcggcaactccaccgcgctgcgccacggcaccaccagcgccaacacgagcaacaccaatgccaggctgctcaggagcacccggggcgcatgggcctggctgcggcggctccaccactcgcgccactccttgaagatcggcagaaagatgaaccacaccagttccaccagcatcaggaagatcccgagcatcttgaagaacaggtgatacaccgccagcgcgatccccaggaacagcgctgcacgccacaaccacgccagatagccccaccccagcaaacgccgttgcatgctcggcgaccagggttctggcgccggctcgccatagccaaacagcagctctcgcaggcgccagcggcacagcgcaaaagcgcgaccttgcaggttatccacaccccacagatcactgatcaagaagtaaccatcaaaacgcatgaacgggttcaggttgatcgccaacgtggtcagccacgtcgcgctcgccaacatgaatgccgccgtgcgcgccgggccatccggcagcagcgaccacgccagcagggcgatgcacgccaacagcagctcagccatcaccccgccggcaccgatcatcagccgcgcgcggcggtcattgacccgccaggcgtcactcacgtcggtataaaacatcggcagcaataccatgaacgcaacgcccatgctctgaacccggcacccggcgcgcttggccataaaggcatggccgaactcatggcacagcttggcaaagaacagcgccacgccaaacgccagcgcaccgccaaggctgaacaggtgcgggaaagtcgccaggaagcgctgccaatcccgcgccaccagaaagaggccaagcccaagaatgatcggcaggccgtagcgcaggaatcccgggccgaagcgcgccagccagggccacgcgcggttgagaaacgcatccggacgccacagcggaatacggaaaaacaggtattgatgcagcagcactttgcccaggctctgtttctgggcggcggatttgtagaggtagctggcgcgctggtccgggtcgagggcggcgatcaggtcatgggcgcgcagaaaagccagcaactcttccacttcgctgccacccagcggtaagcccggctcgcgattggcggcttgcaggactttttccgggtcacccaacgaccagtggcgcagcaggcgaatggccgtggcgccgagtttgaaataacgcccgcgcaccgggtcggccagggtccagcgcggcgagccgtccagcgccgcgccggcgctggacagttgcaggtcttcgcgcagttggggcagcttcatcagaggccaacgctctggcgcaggcctgccagcggccgacgcaatagataaagggccagcggcgcgcggtcgccaaagatcttcgcggtaccgcgcaggccgatacgcggtggtgcgtcgtcgaactgcgcatccagccgataggccaattgcccgcccggcgtgggctgtgcttcgtaagccgcgcgttgcagggtggcgaggtggcgttgcagcgggtcactgtcgaggaacaacgcaacctgagcgtcaggcgccaacgcaatcgcatcgcccacggccagttcgatgcgtaattcggcttggccagggtcggcgatctgcaacaggcgctcgccggtttgcaccggtttgccggtccagcggtcagcgtcggcgaatacggcgatgccgtcgcgttcggcacgcacttcgctgcgtttgagcaactcacgggcgtagtcgcgttcggcgcgtttttgctcgacccgggccgccagcaggtcaatgcgcgaactcgattcggcatcggcaaacgcgcgctgggcattggctttgagttccgcctcggccacgcccaaggctcgcgccgccacgtcggcctgggccgtgagggtggtgctttcaaaacgcagcaacaggtcgccggttttgaccgcttgattgggcttgaccagaaactcggcaatcaccccatccagcggcgcggccaccacttgcccggccagcggcaccacttcggcgggcgccagcaccgactggcgcaccggaatcagcagcaacagcagcagcgcgaccaccacggccacctggcgcttgcgggtcaggcgcaaccgccacggctggcggggttgcagcgcgtgccaggcatggctgtaggtgtcgcccagttgcgccagcaatatttgttcggccgggttccacggcacatcgcgggccagccataaaccaccgaatacgcggccttgcggatcaatcagcggcaaccagaacacctggcccgccgataaactctgccagtcggcctgcaccgcgtcgctcagttgctcggccggcaccacgcgggcggcctggcccagcccctgcttgtgcaactgcgccaccgcctgctcgacaaacgccacgaacggcgcattcggatcgacgctgctcaccgccgtcaccgcctgcaccttgcccgcgatcagcaacgcggcatgccgatagccgaacagcggctggctgtcgttgaccaggctgtaggccagctgctcggtggtgcgcgcggcgcgggtctggcgctcaaggtccaggaactgcgcgaatacccgctcggtgttgcccggcaggggcgcgttcattgcagttgcgcaaagtgggcggtgccgctcatgccggccatcaagccaccggcattgggcaacgtcgcgaccagcagcagcgtctggctgccttcgtcaatgcgcgcgccaagacgtttaaccgtggcgctgaacgcctggccggtttcgtcggggatgaaattgaaagtctggccgggcttgagtttgcccatccagcgcgacggcaccagcaggtggatttccaggctgcggttgtcgacgatttccagcagaggcgccccggccgacacgctttcatagcgctggaccttgcgctcgaccacttggccgtcatacggcgccagcacactgcagcgtttcacctgaacctgatagacctgggactgggcctgggtttcgctgagcttggcttcagcgcgggccacttcaaagcgcccgacggaattgagtgccgccaattgtttattgtgggccagttcctcaccggcgccacggctggccgcctgggaagcattcaactgggcctgataggccgagcagtcgaaacgcgccagggtgtcgcccttcttgaacgcctcgccttcgctgaacggcagttcgacgatgcgccctgacagctcactggccagcaccgcctggtcgcgggcacgcaacacgccgcgtgcctcatcagcgccggcggcggccgcaggcgggtgatccagcagcgggtcgtccgccaaggccacagacgccatacccatcaggcaggtaaaacccaacatccctagtcgcaattgcttcatacgatcctccctgacgatgagcgcagtctagggcagggaggccagattgccactacccataatcggacaaatcagcaatttgtgtgggccttcaccgatgcagttgtcggatcaagctatgattggccccttccaaggactcaggatcaaggacacgtcatgcgcatcggttttttgtcacccctggcagtggccctgctagccggcatctcgctacaggcccaggccagttcggacgactcgtgctacccggactggcgtgtgtcgcgggacacactggatacgtgcagcaacctgccgttcctgagccccggcaatgacagccgggtcaacctgcgcctgctgctggccgacaaaaagaacacgccgctggcccccaacgccctgagcgaggatgacctgtcccaggggtttggcccggtaccgtttccggtgtaccgcctcgccccacgcgacgccgccgaaaccgccagcaccccggacgatcccaaggccctgacactggatgcgctgatcgaaccgctgggcatccagcgtgctgataaaaaagccgctggcgatgccttcctcaatggcgagggcagccgctgccgcagcaacgacgatgccagcgcgaatgcgtttgtcagccaggtggtcaaggccgacctgccgacggccgagcgcgatctgttgataaaagcacgcctgcaattgctcaccgcgtgcgaatggaccgggccggtgatagaacccgcgcaagcgatccagtcgccgcaaggccaacggtttggcacctacctgcaagcggctgccgatttctataccgggcgctttgccgaggctggcgctggtttcgccagcctgcaaaacgcgtcttcgccgtggctcaaagaagcggcagcgtacatggtcgcgcgcaatgcgctgaacctggctcaggagcatgtctacgacgacgagggcgtgccccagcttgaccgtgtggataaacctgcattggccgccgccgaagagggcttcggtgcttacctgaaaacgtatccacagggtgaatacagcgcctccgcgcgcggcttgctgcgccgggtgtactggctggcaaatgacaacaacaagctcgccgacgcctacgcctggcagttgacccaggcaacggacgagcaacgcaacctgagcctcgatgcgttggtggaggaaaccgacctcaaattcctgatggtcaacagcgagaccgtcaagacgccgatgctccagtttgtcagcgacctgatggtgatgcgcggcggcggtcagcccgccctcgcccgcagcgacctggaaaagcagaaagccgcgtttgccgacgcgcccgaactatatgactacttgctcgccgtgaacgcgctgtataccgagcatgaaccggataccgccttgaagcacttgccgcagagcgtgccggcgagcctgaactacttcgccttcagccaacaaaccctgcgcgccctcgccctggaagccaaaaacgactggaaaggcgcgcaagcgctgtggctgcaactgctgccgctggccaaactggcgctgcaacgcgaccagctggaactggccctggcgatgaactacgagcgcagtggccagttggcggaggtgttcgccgccgattcgccgatagcggccaaacaggtgcgctacatcctgctgcgcaacgtggccggccccgacttgctgcgccagcaaatcgccaaggccagcgacccggtagaacgtcagaccgcgcagttcgtgctgctttataaagacctgctgcgcggccagttcgcgaccttcgtcgacgtcctcaaacaactgccggcgacggcgccgcaagacaaactcggcaccagcctgggctacgtctacaccgcgggccagagcctgaagctgttccagtggagcggtgacaaagccgagtccggctacgcctgcccgagcatcgcgcacacggccgcgaccttgcaaaacgacgggaaaaacccgcaagccctgaactgcttcggcgaattcatcctgcgcaatggcctggacggcatgccgcttgagcaagcgcgggcggcgggcagcctgggaagcaccgcgtcgcagttcccgggggaaacgttctctcggctcgacggctacaagcaggtgatcgccaatgccaaggcgccgaagaacgacaaggcctatgcgctgtttcgcgccatcaactgctactcaccttccggctataacagctgtggcggcgtagacgtggaaccaaaggtgcgcaaggcgtggttccgccagctgaaaaccggctttgccgatacccagtggggcaaatcgctgcagtactactggtgaagccgctgtggctcggcttgctgttgctggcaagcccggctttcggcgccgttgacgcccgcgactatgacgccttctggctgtggagcggcgtcaagccccagcctgtgctcaggcaggcgaaaaccctgtacgtcctccagggccagatcaactccacccgccgcgcacccgagcgcggcgtgcaactgatcgcccaaggcatgagcgtgccacgcttgacccgtggcgaaatctgggtggtctaccgcgcccacaccctgcactggccggaacaggtctacacccaactgctcggccaggtgcaacgctggcgtgaggcgggcaacccggtggtcggcatccagatcgacttcgacgcccgcacccaatacctgcacgaatacgccggcttcctgcgcgacctgcgccagcgcctgccggctgacctgaaactgagcatcaccggcctgatggactggagcagcaatgccgaccctaccgccatcgcacagctcaaaggcgtggtggatgaagtggtggtgcagacgtatcaggggcgccacagcatccccgattacgcagcgtatttgccgcgcatgaaccggctggggctgccgttcaaggtggggttgattcagggcggggtgtgggaagaaccggggtatttgaagggaaatgagtggtttcgagggtatgtggtgtttttgcgcaatccatagacacacaatccccccgtgtgggagctggcttgcctgcgatggcatcgactggataaacctgatgtaccgaggtgcccgcatcgcaggcaagccagctcccacatggaatcgtgttcagcctgcgggaatgggcgccgtttcggggtagacggattgccaacccccacccaacgccttgtaaaggccgaccatcgccagcgacacgccggtggagctttccacccactgctcttgcgtcgccagcaacgcgctttgcacggtgagtacgttgacgaaatccaccacgccttccacgtactgctgttgcgctgtggccagcgcgatccggttctggcgcacggcttcggcgaggctgtcgcggcgcagttggctggcgttgtagcgggtcagttggtcgtcgatttcatgccaggcgcgcagtacggtttgctggtacgccagcgccgcttcctgttgctgggcttcgcgcaaattcaacaggccttgcaggcgcccaccgttgaacagcggcaggctgaattgcgggccgaaggcaaacgcgcgtgagccccaggaaccaaaatcggagagttgcaacgcttgtgagccgaggctgccggacagcgtgatacgcgggtaaaaatcacccttggccacgccgatattagcggtggcggcgtgcaggcgcgcttcggcctggcggatatccgggcgacgctcggcgagttccgacggcaggccaatcgcgacctgacgctggctttgcggcacggcgccatccttggacagttgcgcgtgcaaggcttgcggcggctcccccatcaacaggctcagggcgttgatcaactggtcctggcgttgctgcaaatccggcaagcgcgcttcgatggcggcgacttgcgcggcggcttcggccacgtccaaatcagtggccacgccgtcggccaggcgcagttgcgagagcttgaggctgtggcgcgccacgtcaaggttttgctcggtgactgcgcgggtgttctgcacgccccgcagttggatgtagtcctgggccgtttcggcaagcaccgacagcaacacggcacggcggtcgttttcggcgacttgcagagtggcgtcggcggcctcggtttcgcgtttgacccgcccccagaaatccagctcccatgcggcggagaaacccatgtcccattggttataggcggactggccattgttgcccgacgcatcgctcaagcctttggcgctggcgcgctggcgcaggtaatcgcccgtggcattgacgttgggataacgctcggcggtggtcacctggcgcacggcgcggctctgttgcaggcggctgctggccagtttcaggtcgaggttatcggtgagcgcgcggcgcgtgagggccgagagttgttcgtcgtggaacacgtcccaccagcgctcctgcaatggatccgtcacggcccggctggcggcttgacggccttggggttcggcccactgcgtgacgtgcgggccctgaggtttctggaagtccgggccgacggtgcaagcgctcaggctgatcaggctcaaggtgagccaggcgaggtgtttcattgctgggccacctcacgctgctgcgcgacctgttgggtgtcgacgctggcttccaccgacataccgacgcgcaggcgctcggtcagcggctggttcggctccagtacgattttcaccggaatacgctgcaccaccttggtgaagttgccggtggcgttgtcgggtttgaccgaggcaaaggtcacgccggtggccggcgccaggctttccagatggccattgagcagtgcgccatcaaggctgtcgacgcgcacttgcacggcttggccggcgtgcatgtgcgagagctgagtctcctggaaattggccaccacaaaggcctcggccaaggggacgactgcaaggatcttgctgcctggcgtcacataagcgccgacccgcaccgcgcgttcgccgaccatgccgtccaccggcgcgacgatgcgggtgtaagacagctgatagctggccatttccagcgcggcctgggcacgtttgagcccaccttcggcggcatcacgctgggcggtgagaatttccacttgcttgcgttcagccgccagcaccgccgtggcattggccaggcgcgcgttggcctggtcgatgcgggttttggcttgctgggcgttctgtaccgtgcccgcgccaacaccggcgaggtggttgtagcggttcagttcatgctcggcgaacgccacttcggcgcggtctgccgccacggtggcctgggcctgggcgatcaccgaactttgccgttccagggtcgcggtggcatttttcagctgggcctgggcgaccaaagtgtcggcgtcggcggcttgggcggcggcgcgaaaatcccggtcgtcgatcagcgccagcaattgcccggccttgacgcgctggttgtcttccaccagcacttccttgataaagcccgccacgcgcggcgccacgagggtgaagtcggcggcgatgaaagcgtcgttggtggtctggcgtttgctgcccaaaagtcccggcgcaaccaggtacaccagcacgccgacagcaaacacggtgataacggagacggctattttgtctttgcgtttcatgggaaatccttttggctaggtcggtgcgcgcggtggaaaaatccgcgtcggcatccagaaaatcagcagaatcaacgccaccgcgacggcggccatgacgtaataaagatccgaagaggtcagcaccacggcctgctcgtgcaggcggtgagccaggcccggcgcatcgccgtcggccaggggcgaattgcccaggctgtccaccagcatggtcgagtggaagtgcaaacgttgcgtggtcagcgtgtccagcacggcagtggcgatcaccgcagcaaggcctttgatggtgttgaaccacgccgaggcgaaggggccatccatcggctgaatgctgccggtggagagcatcagcagcggcaacacggccatgggctgaccgaagatttgcagcaggtacaggccatagaaatcgtcgcgaatccattccgaggtcaggtgcgaactgcccacgcagcacagcaccagcatgctcaagccagcgcccagcacccagcggcaatccacccagcgcaggttgcacagcgctgccaccagcggcagcgcaatcaattgtggcagcgccatcaggagcattaccggcgcggtttgcagcgggcgataaccctgaacctgggcgaggaaactcgacgggatgaggatcaccgaagtcagcaccatcaacacgcccgccagcacgatcagcgcgaaggacaggttgcgcaggccgagcatctttagcttgaaaaacgggatcggctgcgaccattcattgagcataaacagcaccaacaacagcgtgccgccccccagcaggaaggtgatcaggccagactcgaaccagtccaggcgattgccctgcaacaggccgatcaccagcatgcagatcgccggaaaccccaacagcaggccgcgccagttgaactgtttgaaacgctccaggcgcacggggtcttgcggcaggccataggccacggcggccatggccagcaggcacggagcgactatttgccagaacgcccattgccagccgacgtattcggtccacagcgccgccagcggcgtgcccaggctcgggccgaaagtggcggtgagcgcgtagccggccaaaccatacagtttcacgttggcgggcaagaaacgcagcgccacggtcatcagcatcggcggtaacgcgcctccggccaggccttgcacggtacgcagcaccagcaagctttcgtaattcggcgcaaaggggcacaggacacccagcaccgtgaacaaaccaatggcgtacaacgtgaagcggcgcagggaaaacgtcaccgaacaccagggcgcaaaggccattgccgcgaccgaggtggcggtataggcggcgaccagccaggtgccttcgtcaaaaccgatgtacagcgcaccgcgaatatcggcgagggcgaccttggtgaccatctcgttgaggccggacaccagcaccgcgagcaatacgccaaccaggccaatgatgatgcgcgggccgaacacgggcgggttcagggcagtgggttgcgctgcagccgcaagggtgggggcagcaagggaagtcatgaacaggtaactcggaatgatcaatacccgagcagtttaatcaggcacatccatgacaaaaagttacttgttggaagcttataagtgcgccagacgcaattatcagcacccctcgcggaacctgtgggagctggcttgactgcgatagcggtgggtcagacatcacagggctgactgacagcccgctatcgcaggcaagccagctcccacattgaccgagtgcaggtcaggtgggttgggcttccagccaggtggcgtggcagctttcgcgcatggtctcgcgcagccatttgtgagccgggtctttgtcgaaacgcgggtgccaggattgcgccagcaccagcgtcggcaaggagatcggcagcgcgaaggcgcgcagtggcagtttcaggcggttggcgctcagcagcgcttccttgggcaccggcaacagcaggtcggagtcgggcagcatgaacatggcgccgtggaagcccggggcaatcattgccacgtggcgttccaggcccagctcattgagcgccgtatcgatgggcccacgggctttgccgcgccgggaaatgctgatgtgcgagtagctggcgaaacgtgcggcggtgatctcttcatcgaagagcgggtgatcttcacgtgccagaccgacgaaggtggtggaaaacagcgtctgcaccttcacttccgggctgggcggcatggtgttgctgacccgcaagtcgagccggccttcacgcagggcatcgtcgtcagtgtcggcttcgggcacgaagcacagttcgcacagcggcgccatgcgctccatggtgtcgaacagccgaccgccatagacgccgataaaaaagtcattggcccgcacgctgaagcggcggcgcagggttttcaggtcgacttgatcggcggaacgaaacagcaacgccgcctgctccaccacattgcgtacctggccttgcaactgcagggctttgggcgtcggcaccaggccgcgaccggcgcgcaccaggatcggatcgcccaccgcttcgcgaatacgcgtcagcgtacggctcatggccgccgggctcaggttcattcgccgtgcagcgccaaccacgctgccctcgtcgagcaaggcgtcgagggcgaccagcaggttcatgtccggtagttgcatgccaagcactcgtggtcagtgaaaagtacagtgcacgcaatcctaacaggctttacaggtagagctttgtgctgcgtggcaggtaatccgcgtaagccgctttggggttggcctgacacttttgcacgatttccggcagggctttttcgagctcatccgctttggacaagccttcggcgtagtcctttttaccgctcaacgccgggaacatcaccgcaactcgggtaatggcaaagctcttcatgtcgatcaacgggcgcgtgggatggtcgcgccggaactggctcacttcctcgttcaatgcgctgcagggctgataggtggtttgcgtgaaggtcagttggacgctttctttgctgggctgcgtcggcgtaaagatcatgtcgttttgcgcctcgaccaccgctggctggtcggcactcacgtcccagggtttgaagcgccattgttgggctgcggcgacggccgcgtcaccaaatacaggctgtgtcgcgttgagtgccttgacgtcgctgaccgtgccgtcgttgtgaatcttcaggctgatgcgtgcgtgcccttgcgtgcctgcctggcttgcgggataggccggcttgggcatggacaccgattgcggggtgaactgggcaaacaccgaagacgataaaaacaaagccaccgccaggacaaaaaaccgcatcgccgcaaatccttctatcgggaatgcctgacgtcagggcggcgtcaggttcggccggtattatcgggcgcacacccggcacatagcaattattcctgtttagcgctgcatgccccaacgtttgacggtgagccgctcgaaggtgtcgaacacgaggttttccaccagcaagccgatgagaatcaccacggccagcccggcaaagaccttgtcggtatacagctcattgcggttctggaagatgtaccagcccagcccgccttttccgctggtggcaccgaacaccagttcagcggcgatcaaggtacgccaggcgaatgcccagccgattttcagcccggcgagaatcgacggcagtgccgccgggatcaggatgaacagcacaaagcgcatgcccttgaggccatagttgcggccggccatgcgcagggtttccgacacgccgagaaaccccgaataggtgttcaaggccaaggcccacaacactgaatgcaccagcacaaaaatcaggctgttctgccccaggccgaaccacagcagtgccagcggcagcaatgcgatcgccggcaacgggttgaacatcgaggtcagggtgctgagcaggtcacggcccaactgcgtggacaccgccaacgtggtcagggcgaacgcgagcacgatgccgatcaggtagcccttgatcagcaccgcgagggaaatgctcactttgctgactaattcgccactgagcaggccgtcgaacagcgcctgcgaggtttgcaggaagcttggcagcagcaaatcgttgttctgataacgcgcgacggcttcccaaagaatcgccagcacgatcaggatcaggcccttgcgcagccagccttgttgccacaaacgttggcgcaggggcagctcgcgttccacggggacggtgagcaacggttcgaggttgacttcaaattcctggcgcatacgtcggccccttagtaagcaatgcggatatcggcgaagcccagctcttgctcggcttcgggcgcttcatcgaacagcaggcgatggatccgccgcgccgacgcctggaattccacaccgccgaggctgtgcaggtcgtattggtggctgtggatttctgcgcgaacccgccccgggtgcggcgacagcaacaggatgcgattgcccaccaccagcgcttcttcgatggagtgagtcacaaacagcaaggtgaagcgcacttcctcccacagcagcagcaactcttcctgcatcttgcgtcgcgtcagggcatcgagggcggcgaacggctcgtccatcagcaggattttcggctgcatggccagggcacgggcaatcgccacgcgggctttcatgccgccggacagggtgtgcgggtaggcgtcggcgaaggcactgaggccgactttttccaggtaatgcagcgcgcgctcttcggcttcgcggcgcttcaaggttttcgacgccagcagcgggaacatcacgttctgtttgacggttttccacggcggcagttggtcgaattcctggaacactacgatgcggtcggggccaggctgttcgaccttttgccccagcaagcggatctcgccctcgcagggtttgataaagccggcgatggacttgagcaaggtggatttgccgcaacccgaagggccgagcaacacatagcggtcggccgggtcgatttcgaagctgacctggtgcgtggcccgcaccacgcgctcgggggtgcggtattcaaggctaacgttatccaccgccagcaagggctcggcggtgatcgggttgctggccgcgtggccttgcaggggcgcgttcatttcatctctcttgccggggaatcagaaaggcgcatcgccctggatagtggtgcgaaacagcttgcgacgcaggtggctcgggcaaccggcagccaggtggatcagcgagcggttgtcccagaacaccatgtcatggggttgccagtggtggcggtagatgttttccggcaacacactgtgggcgtagagctgggccagcaggtcgcggctctcgtcttccggcaggccgacgatacgggtggtgaaaccttcgctgacgaacagcgccttgcggccgttttccgggtgggtgcgcacgatggggtgtaccacttcggccacttgcgccagctgctcaggcgtcagggtcgggcgccagttgccttcgaatttggtttcgctgtaacgcgcggtgtaggagtgcgcggcgctgcggccttcgacggctttgcgcaggtgctcgggcagttggtcccaggctttgtgcatgtcggcgaacaaggtgtcgccgccttctgaaggcagctcctgggcgtgcagcatcgaacccaggctcggcagttctttgtacgacaggtcggagtgccagaacttgcctgcgtcacccaggccgatggattggccgttttcgatgatgttggagacgatcaggatttccgggtggttggccagcaggaactgtttgagcacgtggatctgcagcacaccgaaacggcggctgaaggcgatctgttgttcagggctgatgcgctggtcgcggaagaccacgacgtggtggtccaggtgcgcgcggtggatgcgcgtgaagtcgtcgtcgctgaccggacgggacaggtccaggccgatgacctcggcgccgacgctgccggggagtgggcgaatgtcgaaacgttggggggttgcggtcgctgttggaacagtagaggtggcggacatgaggggcactcccggtcggacaggggagtgactttatagatataagaaggggcgcttaaataccgttagtgaatatcgatatgcttaagggttgggttgggtggtggggctgagggcgccatcgcaggcaagccagctcccacatttgatgggtgtaaacattcaaatgtgggagccgggcttgcccgcgatgaggccctgacaggcgctgaagatcaacgctcgtgcagagcctcggcccgcgccttgatgatcggcttgagcaggtagctcaggatgctcttcttgccggtgatgatgtccaccgacgccaccatgcccgggatgatcagcagcggcttctcgtcggtgcccaaatggctgcgatcggtgcgcaaggtgatcatgtagtaggtggttttcttgtcttcatcggtgatggtgtcagcgccgatgcgttcaagcttggccttcaggccgccgtagatggtgtagtcataggcggtgaatttgacgatcgcttcttgccccgggtgcaggaaggcgatgtcttgcggacggatcttggcttccaccagcagggtgtcgttgagcggcacgatttcaaccatgtcgctgcccggctggatcacgccgccgacagtgttgaccagcagctgcttgacgatcccgcgcaccggcgaggtgaccagcgtgcggctgacgcggtcttcaagggcacggccggttgactcggccttgttcagttcggtgcgggcttcgttgagctgggtcagcgcctcactgcggaacttgccacgggtttcgtcgatcttgcgctgcacttccttgatagctgactcggcacggggaatcgccagggtggtagcgtccaactggccacgggtttccatctcggcacgcttgaggcgcagcacttccaccggagataccgcgccttgagccaccagcggctcggacatgttgatttcctggcgctgcagggacaactggctgcggtactggccttgcttggaggtgaactcgcgcagttcctgctgacgctgtaccagttgctcctgcaagccgcccacttcgtctttcaactgctggcggcggctttcatacaaggagcgctcgttggcggcctggctgggcgcggccttgagcacgtcgtcgggaatgttcagcgggcggtcatccacctgcgcgctcaggcgctcgacgcgcagttgcatggccaggcgcagggcttcggtttcccccgcgttggacacgaagcgggtgtcgtcgaggcgaatcagcggcgcaccggcttcaacgatctggccttccttgacgtacagctcggagacgataccgccttccaggttctggattttttgcaacttggacgacggaatcgccttgccgtcgccacgggtgacttcgtcaatgctggagaaaccagcccacgtcaccaggaacacgaagaacgcgatgatcgcccagatggtcaagcggatcacccgcggagcatcttcgatcagcgccttgttgacctctggcaggggttggccgtgcagcgattcggagcctttgaaatagcggccgaccgcgcttttgatggacttaagcaacactgatctgcccctttttcaacgcttccataaccacggctttcggaccgtccgcgaggatctgcccacggtcgaccaccagcaggcggtccaccagcgagagcagtgaggcacgatgagtcaccagcaccacggtcttgttttgcaccacggcttgcaggcgttgtttcaagcgttcttcaccggtgttgtccatggcgctggtgggttcgtccagcaacaggatgggcgggttgagcaacagcgctcgggccagggcgacgttctggcgctggccaccagacaggttctgcccacgttcgcccacttgcagttcgtagccctgggggtgcaggcgcgcgaactcgtgcacgccggccagttcggcggcttgcagcaccatttcgtcctcgacataacgcgcaccggaaacgaggttgtcacgcaaggtgccggccagcagctggatatcctgggcgacgtagccgatgttgtggcgcaactcgctcacgtcgatctggcgcacatccacgccatccaccagcaaggcaccggagtctggctgatacaggccgacgatcagtttggcgagggagcttttacccgagccgctgcggccgatgatgccgattttttccccgggtttgatcaccaggttgatgtttttcagcgcagcgttctgctggttcgggtaggtgaagttcaggccccgacactcgatggcaccttgcagggtgcggcggctcatggggcgctcttcgaaattgcgctcctggggcagttccatcatctggtccaccgaggtcatggtgaccttggcttgctggtaacgggtcaacaggcccgacagcgatgccagcgggctcaacgcgcgaccactgagcatgtagcaggcaatcaggccgcccatgctgaggttgccgtcgatgatctggtacacgccgaacacgatcatgaccacgccggcgagttgctggataagcagggtcatgttcatcgacaggcccgacagcaacttcacgcgtagctcgaggcggctcaaggtgccgatggtctgttcccagccgtactggcgctcgctctcggcgttgttgaccttgaccgcgtccagcccggcgagggtttcgatcaggctcgactggcgctcggcagccagggccatggttttctccatggtcgccaccagcggtttttgcagggcgtagccgatacccagggccagcgggaacgccagcaccggaatccacaccaggtgcccgccgagaatggcgatcaccaggaaaatcagcagggtgaacggcaggtcgatcaggctggtgagcgtcagcgacgcgagaaaatcgcgcaggctctgaaactcgtggatgttctgggcaaagctgccgacccgtgccgggcggtacttcatggacatgccgacgatgcgctcgaacagcgtggccgagatgatcaggtcggtctttttgccggccaggtccaggcacaggctgcgcaggcttttgagaatcaggtcaaacaggtacgcaccgccgatacccacggccagtacccacaaggtggcggtagcctggttcggcactacgcggtcgtacacgttcatcacaaacagcggtgccgccattgcgatgatgttgatcaggaagctggcggcgatggcgtcggtgtagagccagcgcgaacgcttgagggtgtcgcgaaaccacgaacgcgcacgcggaatgagggtgccgtggttgacatcgaatttgtgctgcggctgagcgaagaagactttgccgatatagtcgtcggcgagctgctcgcgcttgatcagcacttcaccgccgtcgctttcgctgagcaggattcgcgcttcatcctcgccctgccagcccaccagcacggtactgcgcccgtctttgagcaacagcagcgccggtagcgcaatggtcggaatctgttcgagcttgcgctgcaacaaccgcccctgcagcccggcacgcgccgctgcacgtggcaacagctcggcactcagccgctgcgaaggcagcggcaggccggtggtgagcatggccgcgctggccggcttttgatgcagtgcacagagtgcaagcaacccgtcgagtaacgggtcgtcgtgcagcgtgcgtggatcatgactgagatgaactcgactgacttcggattccacgcggtgcactctcgactaacagttggggctattggggtgactcaattcatcccgggcagttggactttaggcttcacgtcgttctgcacgacggaggccatcggtgcgaccactccctggcttttgagcaattcgcccatggtcgccttgattcgatattgagtaaataactgaatgttcttgatctcttccagacgacgggaagcggtgaacaattcattctcgctgtcgagcaaatcgagcagggtacgctggcccaggctgaactgttgctggtacgaggtgcgcacgcgggtgctgtggtccacgtattgctgggcgaccggcaactgcgcgttggcgttgttcaaagcgttccaggccaggcccagttcttcattgagttggcgcagggcgttgttgcgaatgtccagggcctggctggtctggtacgacttggactgcaggtcagccttgttgctgccaccggcgaacaggttgaaacgcatgcgcaccatggcttcccaaccgttgctgtgaccggcatcgccgccgacgttgttgtcggcattggtgccaagttcagcatcaaagcgtgggtagaaggtcgacttggccgcttcgtactggctctcggcagccgagatatccgactcggccgaacgcaggatcgggctgttgtcgagcatctggcggcgcgcttcattcaagtcggcgggcaacatggccatgaacggggccgggcgctcaagctggtcgggcatctggccaacggcgctgaggtagttgacctgggagtcggccaggttggtctgctcagtgatcaggttgttacgggcctgggccagacgcgcttcggcctggtcttggtcggcaccgttgccgacgccgcgctgggtgcgcaatttgatctggtcgtagatacgttcgtggttgcgcaggttttcttccgccaggcgcacgaattcgcgacgggtcagcacgtccaggtacacctgggcgacggtcaaacccgtgcgctccgaagtccccagcaaagagtaggcgcgggagttgacgttggcttgttggcgcccgacttcactggaggtggcaaaaccgtcaaagatcatctgctgcaggcgcaggctggattcgccgcggttgtgcgtatcccactggttgccgttcacgccggcggcggcgcgggtgttggagtcgtcggtgccttcacgaccgtaaccggcattcaggtcgacgcggggcaagtaaccgccttgtgccgcgcgcaattggtaatcagcggcgattcggctgttcacaccggcttggatttccgggtgcacatccaatgcctgctgcatcgcctggggcaatgtttgagcttgtacaaaactggcggcgagaacgaacggtattgccttgaacaggtgcagacgcatttaaaaattccccaggacttcttgtctcaaatcacagcatttagcatggctgcgtcggaaaatggctaccgtaatgaccgtacgtcggaaagttcaaaaagcggaactgcttcacacatgtaggacggttcgccgcataaatatcaatgtgacattacggggccgattgtttaggatggcgaccataaggtcaatagtttggcataaactagatagctaataaatctagccaattatttgacgtcattaagtttgcagactacgcccctccaatctggccctccccccgcgagcggccacatggaattcatcagaaacggatcgccggagaaatctttaatgagcagtgttgttgccatcgtcaaaagcattgttggtcaagttttcgtaatttctccggaaggggcgcgccgcgtcctcgttgaaggcgaccgcctcttcgcgggcgaccagatcgataccggcatgtctggcgcagtcagcctggagctggccgacggccgcacgctggacctgggtcgcgacacccaatggagcgctgacacgcccgactccacgctggacctggccgcagccactgcgcaagccgcgccgtcggttgccgaattgcagcaagcgatcgctgcgggcgccgacccgaccaccgacctggaagccactgctgcaggcccgaccgctgccggtaatggcgcggcaggcggcggccacagttttgtagtgctggacgcgaccgctggccgcgtcgacccgacaatcggcttcccgaccgcccctattggccaagccggctcgacgcaaactcagctcaccggcgcccagggttctgccgataacggcaatcttttgctgcagacttcgaccctgaccctgagcgcgaccccgaccattaccgaagccggcggcgtgttgacctacaccgccaccgtcacgcagccgccggtcaacgacctgaccatcaccctgtccaatggcgcagtgatcaccatcaccgctggccaattgaccggtacggtcaacgtaccgctggcgccgaatgacagcccgtacatcgacccgagccagatcaacgtcaacgtcaccggcactaccggcggcaacaacctggtgctgaccattgacccggcgccggctgtcacccagatcaccgacaccatcgacaccaccaccgtcacgctgacggctggccagaccgtgaccgaaggcgggcagattacctacaccgccaccttgaccaaccctgcgcagaccccggtaaccgtcaccttgagcaacggctcggtgatcaccatcaaggccggtgaatctactggcactgtggttgtcgatactccggcgaacgacgtttacaacaacggttcgactgtcagcaccacgattactggtgcgactggcggtaacttcgaaaacctggtgccgagcactacgcctgcggtcaccacgattactgattcgatcgacaccaccactgtcacgctgaccgctggtcagaccgtgaccgaaggcgggcagattacctataccgctaccctgactaacccggcgcagacaccggtgactgtcaccttgagcaatggctcggtgatcactatcaaggcgggcgagtcggttggcactgtcgttgtcgatactccggcaaacgacgtttacaacaacggttcgactgtcagcaccactattactggcgcaactggcggtaatttcgagaacctggtgccgagcactacgcctgcggttaccacgattactgattcgatcgacaccaccactgtcacgctgacggctggccagactgtgactgaaggcgggcagattacctacaccgccaccttgaccaaccctgcgcagaccccggtgactgtcaccttgagcaatggctcggtgatcaccatcaaagccggtgaatcggttggcacagtggttgtcgatactccggccaacgacgtttacaacaacggttcgaccgtcagcaccacgattactggtgcgactggcggtaatttcgagagcctggtgccgagcactacgcctgcggtcaccactattactgactcgatcgacaccaccactgtcacgctgacggctggtcagactgtggttgaaggcggacagatcacctacaccgccactttgactaacccggctcaaacgccggtgaccgtcaccttgagcaacggctcggtgatcaccatcaaggccggtgagtcggttggcactgtcgttgttgatactccgcctaacgacgtctacaacaatggctcgaccgtcagcaccacgattaccggcgcaaccggcggtaatttcgagaacctggtgccgagcactacgcctgcggtcaccacgattactgattcgatcgacaccaccactgtcacgctgacggctggccagactgtggttgaaggtgggcagattacttacaccgctaccttgaccaacccggctcaaacgccggtgaccgtcaccttgagcaacggctcggtgatcaccatcaaggccggtgagtcggttggcactgtcgttgttgatactccgcctaacgacgtctacaacaacggttcgaccgtcagcaccacgattactggtgcgactggcggtaatttcgagagcctggtgccgagcactaagcctgcggtcaccacgattactgactcgatcgacaccaccactgtcacgctgacggctggccagactgtgactgaaggcgggcagattacctacaccgccaccttgaccaaccctgcgcagaccccggtgactgtcaccttgagcaatggctcggtgatcaccatcaaagccggtgaatcggttggcacagtggttgtcgatactccggccaacgacgtttacaacaacggttcgaccgtcagcaccacgattactggtgcgactggcggtaatttcgagagcctggtgccgagcactacgcctgcggtcaccacgattactgactcgatcgacaccaccactgtcacgctgacggctggccagaccgtggttgaaggtgggcagatcacctacaccgcaaccttgaccaacccggctcaaacgccggtgaccgtcaccttgagcaacggctcggtgatcaccatcaaggccggtgagtcggttggcactgtcgttgttgatactccgcctaacgacgtctacaacaatggctcgaccgtcagcaccacgattaccggcgcaaccggcggtaatttcgagaacctggtgccgagcactacgcctgcggtcaccacgattactgactcgatcgacactaccaccgtaaccctgacggctccggccgaggcgaacgaaggcggccagatcacgtacaccgcgaccttgagcaacaaggccggtactgatgtgactctgaagctggataacggctcgacgatcaccatcaaagccggcgacaccgttggcaccgtgaccgtgcctgcacctagcgatgacgtgttcatcgacaagagcacacagaccgtcaagatcaccgacaccactggtggcaattttgagaagctggaagttgcgggtgatggtgcgaccaccacgatcaacgacaccatcgataaagttgatgtggtcctgaccgcgacgggcaccgttggcgaaggcggcaatatcgtttacacagcgtcactggtcgacaagtcgggtaatgcggtgaccaatatcaccaatccgctgaccgtgactttggataatggccagaccatcaccatcggcgtaaatcagtcgagcggttctgttactgctgttgctcctgatgatgtgtacaaaggcgatcagactgtcaccaacgctatcaaaggcgtgactggcggtgagcatttcgaaaatctcgtgccgggcgcagataaagtcactacgaccgtcactgacaccccaggcactgacaacaccaccaccgttactctgaccgccccaagcgcagtgaacgaaggtggtcagatcacctacaccgcgaccttgagcaacaaggccggtaccgacgtcactctgaagctggacaacggctcgacgattaccatcaaagccggtgacaccgtcggcaccgtgaccgtacctgcccctagcgatgacgtgttcatcgataagagcactcagaccgtcaagatcaccgacaccactggtggcaacttcgagaagctggaagttgcgggcgatggtgcgaccaccacgatcaacgacaccatcgataaggttgatgtggtcttgaccgcgactggcaccgttggcgaaggcggcaacatcgtctacaccgccagccttgtggataaaaacggcgctccggtgactaacatcaccaacccgctgaccgtaactttggacaatggccagaccataaccatcggcgtaaatcagtcgagcggctctgttactgctgttgctcctgatgacgtgtacaaaggcgaccaaaccgtcaccaacgctatcaaaggcgtgactggcggtgagcacttcgaaaatctggtgccgggcactactccggttaacaccaccgtcaccgacacaccgggcactgataacaccacgaccgttacgctgactgcgccaagcgcagtgaacgaaggtggtcagatcacctacaccgcgaccttgagcaacaaggccggtaccgacgtcactctgaagctggacaacggctcgacgattaccatcaaagccggcgacaccgtcggcaccgtgaccgtacctgcccctagcgatgacgtgttcatcgataagagcactcagaccgtcaagatcaccgacaccactggtggcaacttcgagaagctggaagttgcgggcgatggtgcgaccaccacgatcaacgacaccatcgataaagttgatgtggtcttgaccgcgactggcaccgttggcgaaggcggcaacatcgtctacaccgccagccttgtggataaaaacggcgccccggtgactaacatcaccaacccgctgaccgtgaccctggacaatggccagaccataaccatcggcgtaaatcagtcgagcggttctgttactgctgttgctcctgatgacgtgtacaaaggcgaccagactgtcaccaacgctatcaaaggcgtgactggcggtgagcatttcgaaaatctcgtgccaggcgcagataaagtcactacgacagtcactgacaccccaggcactgacaacaccaccaccgttactctgaccgccccaagcgcagtgaacgaaggtggtcagatcacgtacaccgcgaccttgagcaacaaggccggtaccgacgtcactctgaagttggacaatggctcgacgatcaccatcaaagccggcgacaccgtcggcaccgtgaccgtacctgcccctagcgatgacgtgttcatcgataagagcactcagaccgtcaagatcaccgacaccactggtggcaacttcgagaagctggaagttgcgggcgatggtgcgaccaccacgatcaacgacaccatcgataaggttgatgtggtcttgaccgcgactggcaccgttggcgaaggcggcaacatcgtctacaccgccagccttgtggataaaaacggcgctccggtgactaacatcaccaacccgctgaccgtaactttggacaatggccagaccataaccatcggcgtaaatcagtcgagcggctctgttactgctgttgctcctgatgacgtgtacaaaggcgaccaaaccgtcaccaacgctatcaaaggcgtgactggcggtgagcacttcgaaaatctggtgccgggcactactccggttaacaccaccgtcaccgacacaccgggcactgataacaccacgaccgttacgctgactgcgccaagcgcagtgaacgaaggtggtcagatcacctacaccgcgaccttgagcaacaaggccggtaccgacgtcactctgaagctggacaacggctcgacgattaccatcaaagccggcgacaccgtcggcaccgtgaccgtacctgcccctagcgatgacgtgttcatcgataagagcactcagaccgtcaagatcaccgacaccactggtggcaacttcgagaagctggaagttgcgggcgatggtgcgaccaccacgatcaacgacaccatcgataaggttgatgtggtcttgaccgcgactggcaccgttggcgaaggcggcaacatcgtctacaccgccagccttgtggataaaaacggcgccccggtgactaacatcaccaacccgctgaccgtgaccctggacaatggccagaccataaccatcggcgtaaatcagtcgagcggttctgttactgctgttgctcctgatgacgtgtacaaaggcgaccagactgtcaccaacgctatcaaaggcgtgactggcggtgagcatttcgaaaatctcgtgccaggcgcagataaagtcactacgacagtcactgacaccccaggcactgacaacaccaccaccgttactctgaccgccccaagcgcagtgaacgaaggtggtcagatcacgtacaccgcgaccttgagcaacaaggccggtaccgacgtgactctgaagctggacaacggctcgacgatcaccatcaaagccggcgacaccgtcggcaccgtgaccgtacctgcccctagcgatgatgtgttcatcgacaagagcacccagaccgtcaagatcaccgacaccactggtggcaatttcgagaacctggtcgttgcaggcaacggcgcaaccaccacgatcaacgacactatcgataaggtcgacgtcgttctgaccgcgacgggtactgttggcgaaggcggcaatatcgtttacaccgctagccttgtggataaaaacggcgcgccggtgaccaatatcaccaacccgctgactgtgaccctggataacggccagaccattaccatcggcgtaaatcagtcgagcggctctgttactgctgttgctcctgatgacgtgtacaaaggcgatcaaactgtcaccaacgctatcaagggcgtgactggcggtgagcatttcgaaaatctcgtgccaggcgcagataaagtcactacgactgtcactgataccccaggcactgataacaccacgaccgttacgctgaccgcgccaagcgcagttaacgagggtggccagatcacgtacaccgcgaccttgagcaacaaggccggtaccgacgtcactctgaagttggacaatggctcgagcattaccatcaaggctggcgataccgttggcaccgtgaccgtcccggccccaagcgatgacgtgttcatcgacaagagcacacagaccgtcaagatcaccgacaccactggtggcaacttcgagaaactggaagttgcgggcgatggtgcgaccaccacgatcaacgacaccatcgataaggttgatgtggtcctgaccgcgacgggcactgtgggtgaaggcggcaatatcgtttacaccgccagccttgtggataaaaacggcgcgccggtgaccaacatcaccaacccgctgactgtgaccctggataacggccagaccatcaccatcggcgtaaatcagtcgaacggctctgttactgctgttgctcctgatgacgtgtacaaaggcgatcaaactgtcaccaacgctatcaaaggcgtgactggcggtgagcacttcgaaaacctggtgccgggcactacgccggttaacactaccgtcaccgacacaccgggcactgataacaccaccactgttacgctgactgcgccaagcgcagtgaacgagggtggtcaaatcacatacaccgccacgctttctaataaagcgggcactgacgttactctgaaactcgacaacggctcgagcatcaccatcaaggctggggacaccgttggtactgtgaccgtccctgccccaagcgatgacgtgttcatcgacaagagcactcagaccgtcaagatcaccgacaccactggcggcaatttcgagaagctggaagttgcgggtgatggtgcgaccactacgatcaacgacactatcgataaggtcgacgtcgttctgaccgccacaacaactgttggtgaaggcggtaacatcgtctacaccgccagccttgtggataaaaacggcgcgccggtgaccaacatcaccaacccgctgactgtgaccctggataacggccagaccatcaccatcggcgtaaatcagtcgagcggttctgttactgctgttgctcctgatgacgtgtacaaaggcgaccagactgtcaccaacgctatcaagggcgtgactggcggtgagcacttcgaaaatctggtgccaggcgcagataaagtcactacgactgtcactgacacaccgggcactgataacaccaccaccgttacgctgaccgcgccaagcgcagtgaacgagggtggtcagatcacttacaccgccacgctctctaacaaagcgggcactgacgtcactctgaagctggataacggatcgacgatcaccatcaaagccggcgacaccgttggcaccgtgaccgtcccggcgcctagcgatgacgtgttcatcgacaagagcactcaaaccgtcaagatcaccgacaccaccggtggtaacttcgagaacctggtcgttgcaggcaacggcgcaactaccactatcaacgacaccatcgacaaagttgatgtggtcctgaccgcaacgggcaccgttggcgaaggcggcaatatcgtctacacagccaccctcgtggacaaaaacggcgcgccggtgaccaacatcaccaacccgctgactgtcaccctggataacggtaaaaccatcaccatcggtgtgaaccagtccagcggcaccgtcacggctgtagcgccaaacgatgtttataagggcgaccaaactgtcaccactgctatcaaaggcgtgaccggtggcgagcactttgaaaatctggtgccaggtaccacaccggttaacaccaccgttacggacacaccgggcacatctgataccaccaccgttacgctgaccgctccaagcgcagtgaacgaaggtggtcagatcacgtacaccgctacgctttctaataaagcgggcactgacgtcactctgaagctggataacggctcgacgatcaccatcaaagctggcgacaccgtcggcaccgtgaccgtgcctgcacctagcgatgatgtgttcatcgacaagagcacacagaccgtcaagatcaccgacaccaccggtggcaacttcgagaagctggaagttgcgggtgatggtgcaaccaccacgatcaacgacaccatcgacaaagttgatgtagtcctgaccgcgacgggcaccgttggcgaaggcggcaatatcgtctacacagccaccctcgtggacaaaaacggcgcgccggtgaccaacatcaccaacccgctgactgtcaccctggataacggtaaaaccatcaccatcggtgtgaaccagtccagcggcaccgtcacggctgtagcgccaaacgatgtttataagggcgaccaaactgtcaccactgctatcaaaggcgtgaccggtggcgagcactttgaaaatctggtgccaggtaccacaccggttaacaccaccgttacggacacaccgggcacatctgataccaccaccgttacgctgaccgctccaagcgcagtgaacgaaggtggtcagatcacgtacaccgctacgctttctaataaagcgggcactgacgtcactctgaagctggataacggctcgacgatcaccatcaaagctggcgacaccgtcggcaccgtgaccgtgcctgcacctagcgatgatgtgttcatcgacaagagcacacagaccgtcaagatcaccgacaccaccggtggcaacttcgagaagctggaagttgcgggtgatggtgcaaccaccacgatcaacgacaccatcgacaaagttgatgtagtcctgaccgcgacgggcaccgttggcgaaggcggcaatatcgtctacacagccaccctcgtggacaaaaacggcgcgccggtgaccaacatcaccaacccgctgactgtcactctggataacggtaaaaccatcaccatcggtgtgaaccagtccagcggcaccgtcacggctgtagcgccaaacgatgtttataagggcgaccaaactgtcaccactgctatcaaaggcgtgaccggtggcgagcactttgaaaatctggtgccaggtaccacaccggttaacaccaccgttacggacacaccgggcacatctgataccaccaccgttacgctgactgccccaaccgcagtgaacgaaggcggccagatcacgtacaccgcgaccttgagcaacaaggccggtaccgacgtgactctgaagctggacaacggctcgacgattaccatcaaagccggcgacaccgtcggcaccgtgaccgtgcctgcgccaagcgatgacgtgttcatcgacaagagcacacagaccgtcaagatcaccgacaccactggtggcaacttcgagaagctggaagttgcgggtgatggtgcaaccaccacgatcaacgacaccatcgataaagttgatgtggtcctgaccgcgacgggcactgtgggcgaaggcggcaatatcgtttacaccgccagccttgtggataaaaacggcgcaccggtgactaacatcaccaatccgctgaccgtcactttggacaatggccagaccatcaccatcggcgtaaatcagtcgagcggctctgttactgctgttgctcctgatgacgtgtacaagggcgaccagactgtcaccaacgccatcaaaggcgtgactggcggtgagcatttcgaaaatctcgtgccgggcactactccggttaacaccaccgtcaccgacacaccgggcactgataacaccacgaccgttacgctgactgcgccaagcgcagtgaacgaaggtggtcagattacgtacacagccacgctctctaacaaagcgggcactgacgtcactctgaagttggataacagctcgacaatcaccatcaaagccggcgataccgtcggcaccgtgaccgtcccagcgcctagcgatgacgtgtttatcgacaagagcacccagaccgtcaagatcaccgacaccgctggtggcaacttcgagaacctggtcgttgcaggcaatggcgcaaccaccacgatcaacgacaccatcgacaaggtcgacgtcgttctgaccgccacaacaactgttggcgaaggtggcaacatcgtctacaccgccaccctcgtggacaaaaacggcgccccggtgaccaacatcaccaacccgctgaccgtgactttggacaatggcaaaaccatcaccatcggtgtgaaccagtcgagcggcaccgtcacggctgtagcgccaaacgatgtttataagggcgatcagaccgtcaccaccgctatcaaaggtgtcaccggtggcgagcattttgaaaacctggtccccggtactactccggttaacaccactgttacggatactccgggcactgccgataccaccaccgttacgctgactgccccaagcgcagtgaacgaaggtggtcagatcacttacaccgcgaccttgagcaacaaggccggtactgatgtgactctgaagctggataacggctcgacgattaccatcaaagccggcgacaccgtcggcaccgtgaccgtgcctgcgcctagcgatgacgtgttcatcgacaagagcacgcagaccgtcaagatcaccgacaccactggtggcaatttcgagaacctggtcgttgcaggcaacggcgcaaccaccacgatcaacgacaccatcgacaaggtcgacgtcgttctgaccgccacaacaactgttggtgaaggcggcaatatcgtttacaccgcgtcgctggtcgacaagtcgggtaatgcggtgactaacatcaccaatccgctgaccattaccctggataacggcaaaaccatcaccatcggtgtgaaccagtcgagcggcaccgtcaccaccgttgcaccaaacgatgtttataagggcgaccaaaccgtcaccaccgccatcaaaggcgtgaccggtggcgagcactttgaaaatctggttccaggcaccacgccggttaacaccaccgttacggacactccgggcactgccgataccaccaccgttacgctgaccgccccaagcgcagtaaacgaaggtggtcagatcacctacaccgctacgctctctaacaaagcgggcactgacgttactctgaagctggataacggctcgacgatcaccatcaaagccggcgacaccgtcggcaccgtgaccgtccctgcacctagcgatgacgtgttcatcgacaagagcacacagaccgtcaagatcaccgacaccaccggtggcaacttcgagaagctggaagttgcgggtgatggtgcaaccaccacgatcaacgacaccatcgacaaagttgatgtagtcctgaccgcgacgggcaccgttggcgaaggcggcaacatcatctacaccgccaccctcgtggacaaaaacggcgcgccggtgactaacatcaccaacccgctgaccattaccctggataacggcaaaaccatcaccatcggtgtgaaccagtccagcggcaccgtcacggccgtcgcaccaaacgatgtctataagggcgaccaaaccgtcaccaccgctatcaaaggcgtgaccggtggcgagcactttgaaaatctggtgccggatactactccggttaacaccactgttacggatactccgggcactgccgataccaccaccgttacgctgaccgctccaagcgcagtaaacgaaggcggccagatcacctacaccgcgaccttgagcaacaaggccggtaccgacgtgactctgaagctggacaacggctcgacgatcaccatcaaagccggcgacaccgtgggcaccgtgaccgtgcctgcgcctagcgatgacgtgttcatcgacaagagcacccagaccgtcaagatcaccgacaccgctggcggcaacttcgagaacctggtcgttgcaggcaacggcgcaaccactacgatcaacgacaccatcgacaaggtcgacgtcgttctgaccgccacaacaaccgttggcgaaggcggcaacatcgtctacaccgccaccctcgtggacaaaaacggcgcgccggtgactaacatcaccaatccgctgaccgtaaccctggacaatggcaaaaccatcaccatcggtgtgaaccagtccagcggcaccgttacagctgtagcgccaaacgatgtttataagggcgatcagaccgtcaccaccgctatcaaaggcgtgaccggtggcgagcactttgaaaacttggttcctggtactacgccggttaacaccaccgtcacggataccccgggtactgccgataccaccaccgttacgctgaccgctccaagcgcagtaaacgaaggcggccagatcacctacaccgcgaccttgagcaacaaggccggtaccgacgtgactctgaagctggacaacggctcgacgattaccatcaaagccggcgacaccgtcggcaccgtgaccgtgcctgcgcctagcgatgacgtgttcatcgacaagagcacccagaccgtcaagatcaccgacaccactggtggcaatttcgagaacctggtcgttgcaggcaacggcgcaaccaccacgatcaacgacactatcgacaaggtcgacgtcgttctgaccgccacaacaaccgttggcgaaggcggcaacatcgtctacaccgccaccctcgtggacaaaaacggcgccccggtgactaacatcaccaatccgctgaccgtaaccctggacaatggcaaaaccatcaccatcggtgtgaatcaatccagcggcaccgtcacggctgtagcgccaaacgatgtctacaaaggcgaccaaaccgtcaccaccgccatcaccaacgtcaccggcggcgcgcattatgagaacctggtgcccggcaagacaccggtaacgaccacggtcacggataccccggccaccaccgacctcaccagcgtcacgttgactgctccgacggccgtcaacgaaggcggcaccattacctacaccgccaccttgagcaacaaggccggcaccgacatggtggtcacgctggataacggttcgaccatcaccatcaagcaaggcgcgaccgtgggcacggtgaccgtcaatgcgccaggcgatgacgtgttcatcgacaagagcacccagaccgtcaagatcaccggtaccaccggcggtaatttcgaaggtgtaaccatcaccccgggcggcgcaaccaccaccgttaacgacaccattgatgacgtgactgtgtcgctcaaagccaccggttcggtcagcgaaggcggccagatcacctacaccgcttctctggtggacaaaaacggcaacgcggtgaagaacgtcggttccgacctggtggtgaagctggataacggctcgaccattaccatcggcaacggccagtccagcaacaccaccaccgccaccgcgcctaacgatgcatatgtcggcgcgaacgatgtcacggccaagatcaccaacgtggtcagcggcggcgacaagtacgagcacctgatcgtcgacggcagcaccgtgaccaccaaggtgacggatgtggtcaccaccaccaccatcagcatcactggcgacgcgtcggtgactgaaggcggcacggcgaactacaccctgaccttgagcaacccggcgcaaaccgatgtgaccgtgacactcaaatacagcggcaccgccaccgacggttcggacttcacgggtgtgtacaccgtgaagattccggctggcgccagcagcgtgccgttcacgatcggcacaatcgacgacaagatcaccgagccgaccgaaaccatcgttatcaccatcgacaagaccactggcggcaacttcgagaacctggtggtgggcaacggcagcgtcagcaccaacatcatcgacaacgacgcgccgccagtcatcgacctggatgccaacaattccagcggtgccacgggagccgactacaagacgaccttcaccgaaggtacggctggcccgggtgtgtcgattgccgacaccgatatcaagatcaccgacccggacagcaccaaactgaccggtgcaacgatcaccctgaccaacgcgcaggccggtgacgcactgaacctgggcaacagcgtgaatggcatcacggtcagcaccaacaaccagacgggcacgatcaccctgacgttgtcgggcagcgcgacgctggctgactacatgcagcgcatccagaacatcacgttcaccaacaacagccacgacccgagcaccacgccgcggaccattaccgtgaccgtgaccgatggcggcaactactccaacgtcgccaccaccaccattaacgtggtggccgtcaacgatgcgccggtcgctaccggcagcgccgtgaccggcaccgaagacacgccgctggccttgacctgggccaacttcggcgtgaccgatgtggactcgccgcaaagcagcctgggtgtgaaaatcaccgacctgccggtggccggcaagctgcagttcctggcagccgatggcaccacctggaccaacgtgaccgctggccagaccttcaccaaagcccaaatcgatggcggccaactgcgcttcatgccgaacgccaacgaatccggcgctgacggttatggcggcaccggcatcggcaacaagcaagcggattacgcgcagttcaagttccagcctactgacggcaaggatctgggcaccagcgcgacggtgaaagtcgatatcaccccggtggccgacgcaccgaccctgaatgtggccgacaacaacgtcaactcggtgggcttgatcaagcaaagctggaacagcatcgccggcattggcaccaacggtaacggtgctgcacctgacgtgttgaaaaaggcgattgatagcgcgggcacacccaacagcactgcggtggtgactaacgttgagtccaccgcaaacgtcagcggcggtgcaggttcgaagacgtccggcctgatgtacatggaagctggcaaaacctacaccttcagcggtaccggcgatgacagcctggtcgtcaatatcggcggcaaagacgtcgccagcgccttgtatggcaccaacagcggcaagttcagcggctcgatcactccgactgtgagcggctactacagcatcgagatctaccacgccaaccaatccggcccgggcagctatgacgtcaacctgtcggtcaacggcgcgccggccacggacctgagcacgagcggcgtgccgctgtacaccggcatcaccgacctgaccaacgctggcgtgaccgtgtccgacctgcatggcagcaacggtgacggttactacgtgggctacaagctcaacgaaggccaggaaaacggcaccgtcaaactgtccaaggtcaccactgcgctgaccgacaccgacggttcggaaaccctgagtgtgaaaatcagcggcataccggcaggttcggtgctgtctgatgcttccggccataccttcaccgcgaccaaaggtgtgggcgaagtcaacgtaaacggctgggacctgagcaccctgaccatcaagccgccgacctactacagcggccagttcaacctgaccgtcacctcgacctccaccgaaagcctcggcggttcggccgtgaccaccgcgcaattgccagtcaccgtttacccggcgacttacaacgcggtgacgggcacttcgggcagcgacgcgatcaccggcactgacggcaacgacatcgtcgtggccgacatcggcggcctgaacgtggtgcagggcaagaactacaacatcgcgttcatggtggacagctccggcagtatgagcaccgcctcgatcaacgcggcgaaggcgtcgctgacctcggtgttcagctcgctcaaagacagccttggcaccaacacgtcaggcacggtgaatatcttcctggcggacttcgacacccaggtgaacaagtcggtggccatcaacctcaacgatccaaacgcactgaccttgctcaaggcggtactggactcgatgacgtcgggtggcggcaccaactacgaagacgtgttcaagaccacggccaacttcttccagagcggcctggcgaccggtaacaccggtgccaccaacctgacctacttcatcaccgacggccagccgacgtactaccagagcggcgagcagaccaacccgacgctgtacggcaacgtcaagttcgacgatgtggtgacgacgtccaactacacaccgggcacctcggtggccaagtacctggacagcacccactacttcactatcgacacctcgggttacgccgtcctgcagaccttgagtggcggcaagtggtcgagcagcaacctgggttatgtgcacgcccagggtgacggtacctatgagttgtccagcctgaacggcaccggcaacagcaccgactcggcgaccctgagcaacgccaaaagcgcctttgcactgctgggcgggttgtcgcaagtggaagccatcggtatcaacggcgacgtcagcctcaacgacctcaaaccgtacgacagcgatggcaagccgcaatccaacatcgatccgaaggacctggccaacgccatcctcggccacaccgaggcgacactgccaggtgcggacaccatcagcggtggcgacggcaacgacatcatcttcggcgacctggtgagcttcagcggcattaccggtgaaggctacaacgcactgcaggcctttgtggcccagaaaaccggggtggccgttacggccgtgaccgcctctaacgtgcaccagtacgtcaccgagcactacgccgacttcgacgtgtccggcgccaaagacggcaacgacacactgctgggcggcgcgggcgatgacatcctgttcggccagggcggcaacgacgtcctggacggcggcaagggcaacgacatcctgctgggcggcaccggtaacgacaccttgatcggtggcccgggcaacgacatcctgatcggcggctcgggtgccgacaccttcgtctggaaagcgggtgacgtcggcaatgacgtgatcaaggacttcaaggcatcggaaggtgaccggatcgatctgcgggacctgttgaaaggtgagacggacagcaccatcgacaacttcctcaagatcaccaccgtagacggcgtgtcgaccctgcaagtgagcagtgaaggcaagctcaatgctgcgggcggcctggccaatgccgatgtgacaatcaagctggaaggcaacgattggtcccacaccagcatcaactcgttgatcactggcgctgacccgaccatcaagatcgaccacaccgcctaagacgcgattaaccggccgcccccaggggcggccgatttatttgggccacaggttgctggccctggcactgggttgcatcgcatactcgcgcctataaacacaccgttggcctatgctggtagcggtgtgtggcttattttcgaggggttcttatgttttacgtgcaacgtgatgcacagggcgcattgagtcgcgtggaggctgcggcctttgccgagtcgaccgaaaccctgccggccgatcaccatgagattcaggcctggtacgccaacgaagtggtggaaaccagcctggctcagctcaagcagagcgacctggaaatgatccgggtgctggacgacttgatccaggtactgacccgcaaaggggttatcagcgtgacggacctgccgcccgcagcccaggccaagctgatggaccgtaaccacgcgcgggaagcgctgggtgggttgagccatttgatcaatgatgaagagaccgggttgatctgaacccatattgctcaaaaagatgagcttgtgtgggagccgggcttgcccgcgatgcgcacgcctcggtgtatcagtgaaaccggggtgatgctatcgcaggcaagccagctcccacagaaagcccgctcccacatttgatcgtggcgtcagtgaattatttccacggcgccggttcaccaaacaactgcccctgcacgccaaaaatccccatctcgcggatcaccttcagctcaccctcggtttccacgcgctcggcaatcaacggcaagtcgatgctgtgtgcggcgcgctggatcgcctcgatgaacaggcgcttgtcgctttcctggtcgatggcacggatgtaacttccatcgatcttcaagtacgccaggcccaggcgcgccaggttgccgatcatgctgaaacgcccgccaaaacgctgcaggctgagggagaagcccagctcacgcagacgctgggtcaactgttccagcagggcctgttcgggcaattgctcttcaccgatttccagagtcaggcgcgggcccaggttgctgtgctggcgcagcagctcgacgattttgttcaacgcctgagggtcctgcagagtcgccgccgagaggttcagcgccaggctttggttgtgaccagccatctgcttgagcacttgctccaggatcaggcgatccagacgggccgaccagccgaagcgctccagccacggcaggaagcgcccggcaggaatggtgtggccgtcttcatcctgcaaccgcgacagcactttgtaatgcagcaccaactgcggatcctggctggcgaccaccggctggaagtacagctggaagcgttgctgggtcagggcttggtcgagcaggttatgccaggcatggtgatcgtcgccgacgctggcagccgcgctgtggtcgaggcacacccaactgctgtcaccctgcccttcggcctgggccaaggcttggtcagccagcgtcaacaacacctgcggtgcatcgccatggttgaacggcgccaggccgatataagcgaccggcgtgacatcactggcaccggtggcctgcaggctttgcaaggtgctttcaaggttctgcgccaattgcagcgcctcttcacgcaccagccccggcgccagcacggcgaactcaccaccgcgaatacgggtgacgaggttgtgggtttccgggtaaggctcacactggcgcaacaactgtgtacccaccgcctgcagcaactggtcggtgcgctggccgcccagacgttgattgagccccgccaggtctttcacgcgcagtaccagcaaatagccggagttggtttcttcggggttgctgacgcgggcgttgagttgcatctcgaagtaacggcggttggccaggcccgtaaggttgtcctggtaggattcgatacgcaatttttcactgcgctctgcctgctcctggaacagtgccttgagcttttccaccatctggttcatcgcctgcaccacgcgtcgcaattcgggcgtgcgcggcaagtcaggcaagctgaggaattcccggcgggcaatggcatgggactgcttgaccatgtagtccagcggcttcaattgccgacgcagcaacagcgcacccaacaccgcgctcaccgcgccgcagagcagcaaccaaccgaggctgcccaacgcgctttgccagagtttggccagggcgaacatcgggtggctgaccacttccactcgtgccgcctgctcccagccgcgattgaccagtgcatcgccaccggccggctccaggccgatcagtttgacgaaccagttgggcacaccgttgttgtcggggataccgctgcgctcaacgatggttttatcggtcgccaggtccaccacacggatgcttgcgtagtagccactgtcgaagatcgaactgaccagcaactccaccatggccgggtcgtcgatattgggtgtcagcgacagcgccagcgccgtcgccgcgtcctgagcatgggagcgcagctggttgacgtattgcgtgcgcgagctttccaggctgaccatgaagctgccgctgaaagcgatcaccaggaacagacagattgcgatcaatagttgtttgaacaaagacaccgatcagttactcctagttggcaggctcggccgggaagccttccgcacgcatttttctcagtacatcctgccagcgcgacaagcgtttagtgtcaccgactttcttgttgccggtggcgccgggcaagtacaaaccctcggcgttgaatgaatacaccggcaccaggtcggtacggcgggtggctggcagaatttcatccatcaggctgtctagcacaagcgggatcgcgtcaggcgtcgaataataagtcaggaccatatgggcgcgattctggcgcaaggccttgacgtaggtaatgcgcaatttgtcgctggagacgcccaggtgacgcaagctgaaatactttgcgatggcgtagtcctcacagtcaccggcacctttccagagggcttcgatgggggtctcccagtagtcgaccacatgccagaggtcgatgtcttccacgtaggtcatttgcttgttgaaaaacaggttcacgaccttgagctgttcttgctcgctgacctgcttttgagtcgccagcagccgttgccagtcatcaatgcgccgctggccctcccccagcggcccgtacaaggcggtggccttgcggctgatctgggagaaatcccaatcggcgtgcagcccgccaggcatcaagccggccaacagaatcgctgaaagtagccagcttgggcatcgagagggaataaaacttaccgccaaggcgttcagtccgtgaagagagacggaaattcaaggaatggtgcagcgtcgatcaacaaaaaacaatggcacagtgcaatcattcatcaatgggaggaagtttataactacccattgtgggatgcttaaagtgcgccctgtaagcccttacaaacggaaactctggttgtttgacaagcgtgtggaccctctctagtgtgcattggatccaattaaacacactttattcaagaaaggaggatagcgtaaccgtgacgcagaagccgaaccctttaagcagcatcaaaatcagtgggcctattcccgcccatcttgctcgcgccgtaattgaagaaacgttgcgtaatgccatcctcgatggccgcttgccctgtggtaccgcaatgcgccagcaagaactcgccagcctgttcggcgtcagccgcatgccggtgcgcgaagcgttgcgccagctggaagcgcaatcgttgctgcatgtggtcacccacaagggcgcggtggtcgcaccgttgatcgaagataactccgccgagacttatggcctgcgcatgttgctggaatccgaagcgttgcgcctgtcgatcccgtttctcaccgacaccgacatcgccgaagctgacgcgttcatcaatgcgctggagcgtgaacgagactacgccgaaattggccgcctcaaccgcctttttcacatgtccctttacggcaaggcacccaaccagcggttgctcaagctggtcgagcacggcttgaatgaggaggaacgcttcctgcggttcaaccttgaggcgatggggctgggcgagacatcccaagaagatcaccgtgaactgctgaacctggtggcgcaaaagaaagtcgatgaaagcatcctgacgttgcgcaatcacttgatgcgcgggatggaagtgatcactacctacttgaacggacttgaagccactgcaaaaaagggcgcgcaataagccgttgcctgtccctctacgatgtgggctcgcctccgttcagagagggccccacgttaattcacctgaacccatttcatttatttaaacggtcttacctgcactaaagaaacttcacacttccagtaaaaccatctacttacaataaaaacctttccgaaaaaatatctaatacattcatcagctcttcaaagcgtttaatcagattattatcgccccccctaaaatcaggcacttcatccggcggggcgatcctgcgtccggtgtgcggcgcgggcggcgcgggcgaacattaattatcgatataaaaccacaaaacacctcactgtttccgagctgtcgcaacaacttataggcatcaaccatgtacctacacttacttgaacaaaaaaaactgcagttgtgcagccatccgttatttatggaaataacttcaattaacaagttacaacttttcatggagcgccatgtgttcgcggtgtgggacttcatgaccctgaccaaacgcctgcagcaggatttgacctgcacccaactcccgtggctcccgcccgcggacccacacgctgcgcggcttatcaatgaaattgtgctcggcgaagagtcagatgaacatccggcgaaaggctattgcagccattttgagctgtatcttgacgcgatggccgaggtcggcgctgacacgagcgccatcaggcgcttcattgaactgcaatgccagggcgtggcagcagatgcggccttgcaaacgatcgatgtgccgccaggcgtggcacgttttgtcgacagcacattgcagatcgctctgaacgcccccacccattgcgtggcagccgcattcctgcacggccgcgaaagcgtcattgcgccgatgttcgagcgcctgctgcacagcaacgcatgcatcgcccgccaggcaccgatcttttgccattacctcacccgccatatccagctggatgctcaagaccatgggccgggcgccgtgcagttgcttcaacgtctggtcggcactgacccggcccgtcaagccgaggccaacgaaagtgcgctcgttgcagtacgcagccgcatcggtttctgggatgacgtgcgcgccgccctgcaagaggtacagccatgaacgccgtcgactaccgctcttttgccgacgattgggagcgtcgggccaccatccgcacacgcccccggcgtcagctggaagacgacgacaagttgatctttcctgtgtgtcgccaacccttggtgctcagcgcaacctttcttgaacactgctcgcaacagcgcgattttgtattaacgcaaagcttttacaaattcctgaatgacgttgtgatctttgaaacagagatcgtcgacaagactgcccgcagcattgccaagaaccgtttctgcccccccttccccctcgcctgccgctatgacgcgatgaccgtcgtggtggatgaggattaccacgcgctggtcgcgctggacttcctgcaacaaaccgtggcaatgaccggcatacaaccgctcgctctacccccagaaatcgaactcagtcgcgccttgcaggccgcacgggccctggccccgacgcacttgcgcgatgccgtggaactgattgccgtcggcatcgctgaaaacaccgtcacccacgatgtggcggcgttttccaaggacgacagcatcaagtcttccatccgcggcctgatggccgatcacttgtttgatgaaggacgtcacgcacaattctggacaaacctggtgcggatttactggcaggcggcaagcccggccgaccgcgatagcatcgctgaaatattgccgatctttttgcggcattacctgaccaacgaattgcaacaacggttcgacctgcagctgatcgaacacctggacaccagcgtcccccttcgccaaacgctgcaggacgaagtcatggcgctggattttcccatcacccgtcatcacccgttgcttggcaacatcatgggttttctgcgccacagtggcgtgctgcagacgccaagcgtcgctcgctcactggatgactaccttcccgaagcgtggaggttggcatgaggcagcttgcgatcggatggagcggtaccagccgggctttgggagccatcaagaaagggttggaaccctacgggcatctccacgtcaccgaggcccctgacgtgctcattgacgatggcagccaggtaccgctctcccataacggcgggactcaaaggctcagcctgcgcctgggtatcggcccggtgcccgagtgtgggttgccccttttacagttacgctgctatgaccaggaccaacgcattgtggcagtgcaagccattcccggggagcccagcggtaatggccagcgcctgtgtcggcgcgcaacgagcgccttagtggagtgggtggccttactcatcagcggcttctccagggacccgggcttctttgccacaaccaccacgataaacacttggcccgagcacggcttgccgggcctcgacgcactggcatttgcgcaccggttcaaccgcactgcacagccagcactgttacaagcggcccaagtgcccatgatcgaacggctggaggcaagccttcaacgctttgccgagcggccggcgctgaacatcgcaggcagcaggctgacttatcaccaattgcaggttcgggcactgtcgatccagcaacgcctgcggcccctgctcgagggcgtcgagtcgcctccagtggtgggggtgtgcctggaaaaatccgttgatttgtacgccagcatactcgcagtgctgggctgcggtgcggtgtacctgccgcttgcacctgaccacccgccactgcgccagcaggccatgatggaaagcaccggggccagggtactgctggacgatgggcaccaccccttacgcaataactacaaccccctggatgtccgagatggggaaatggccagcactgcattaccgctgatgctcaaccgccctgatctcgacgcaccctgcatggcgctattcacctcgggtactaccgggcagcccaaaggtgtgctgctcagccaagccaaccttgcacacttcaccgcttgggcgggtggctgtatggcgttggacgaacaaagccgggtcctgcagttttcgccattgagtttcgactcctcgctgatcgatattttcccggccttgatcgccggtgccgaattgatcgtgccaagcgaagatcagcggcacgatcctcggcaactgatcgacctgattcgccagcaacgtgtgagccacggatttctgccgccggcactgctgggcattttgccaatggatcaaccgttgggcctgacccacctgttgacgggcggagacacctgcgaaccgctggtgatcgaacggttggcgagccagtgccaattgcacaacctctacgggcccacggaagccacggtgctggtcactcaccgaaggttccggcccggtgacagcaaccgcaacctgggccgccccatcgccaacagccaggtgctgattctcgatgatgacctgcagccggtggatgaagaggtcatgggggatctgtacatcgtcggccctggggtcagcctgggatatgtgaacgttgtgcagcaagccgacaatccttttatcaggctaacgctgccagacggcagtttgctatcggcgtaccgcagtggcgatcaggcgatgtggacaacgcaagggatcgagttgggcgggcggcgagatgatcaggtgaagatccatggctttcgggtcgaaccccgagagatcgagcaatgcctgcgcggcagccgattgtttcgccaagtcgtcgtggtgatcgatgcggaccgcaggattttcagctttgttgcccagcccgagccgggtgccacgctggcgagtctgcagcagcatgcccgggagcggctgccggtttatatgtaccctcatgtgtggaccgaactgcccgcgatgccttgctctcacaacggcaagatcgaccgccaggcattgctggccatgccggtacacgcctcgccggtcgctgcgcgccacgcggcgctgacaccgatgcaagcgcggctggtggcgttgtggggcgagttattgagcatgcctgacgcagatattggcatcgatgacagctttttcaatctgggcggccactccatcttgctgtcgaccctgttgctgcgtttgcgcgagcaatttggccgcagcatctcgttgagccgtttctttgaagcgccgacgattcgtacgctcaccgccttgatcgaagatggagcgctgcccaatgtaccgtcaggccagatggaaaaggatgcggcgcagccattgagcgtcgaaatgctggatgaagcgcacgcaggcgacccccgcaaagtgattgtcacgggcgccaacagctttgtcggggtgcatatcgtccaggcgttgttggcggctggcgcgcaacaagtcacctgcctggtgcgagagcgaccgggctgctcggcgatggctcgttttacccaggcgctgcatgagaaccgcctggcacatctggacctcgcacgggtgcaggtctacgccgccgacatcagcctgccccgcctgggcctgaccgaggatgtatatgaacatcttgcgcgaagccacggcgtgttggtgcataacgcggcgcgggtgaaccatgtgctggactatgcgtcgctggccagggacaacgtcgatccggtgcttgagtgcctgcgcctgtgtgaaacccattgcaaaaaagtcttcaacttcatctcgacgctatcggcctgcagccatatcgatgcccgcggcaacatccttgaagcaccggcggtcgcgacccatccgctttatctcaagaatggctacaacctctccaaatgggttgccgagcggttgttggggcgagcggccgaacatggggcctgggtaaacattcatcgcccggggaacatcgccttcaacagtgacagcggggtctgccagccgcacaacaaccgcttgatgctgatgctcaaaggttcgctgcaactcggcatggttcccagcctgaaggccaacttcgatttgatgccggtggacttctttgcccgtttcgttgcgtttcaatgcagccactttgccgtcgggcgaaacatattcaacctgcacaacccacaccccttgagctgggatgactacctcgatgcattccatcaggccggccactgtttccagcgggtgagcgtcgaacattggcagaaagccctgcgaacggtagggcccgataacgcgatgtttggcgtggtcggtttctacctgaatgacctcgccgaagatatcggcgacaccgccatgatttgccacgaaaacgcacgccggggtgtggaagcgatgggcgagcagtacccgcaacaaagcccggcgctgctgctcaaaggctgcgaacacctcaaggccattggctttctccggcccgcctccaggacccgctcatgaaaccgttgcaacccgatacattaattcgtaacccgcaaggcacaccggtggtggcctctgttgaagtggcctgcgaggccgcaggcctttggcatttggtaggcaatttcgcggggttcgatgccttcattcctgccctttcgcacatcgaaatgaccggtgtgggtataggagcactgcgcaaaaaaaacttccgcgatggccattgcgttgtagagcaactcaacagccgggatgaaggggccatgtgcatgacatggaccacgctctacaacaccttgggtatcgcccggctgtgggctgccatgcgtgtggaagcgttggaaccaaggcgctcgaaggcgacctggacccttatcggagagcccgtcgatatgacgcaagcagagtttgaaaggtttgcgcagggcttcgtcgacagtgcgttggagaacgttcgccagatactcggctgatcagcaggagcgagagacctcgcccctgcacaaccctggtcagatcttgaaactgtcgaccaattgcttcaatcggctggcttgctgggaaagcgcatcacagtccttgagcgtttcattgaggttggcgacaccctgctggttcagcaggttgatctgattgatatcgacgttaagggtttccactacggcggtctgctcttcggtggcagcagcgaccgactggttcataccgtcgatctcgacgattcgctgcgtcacgctgaccaggcgctcacccgcctggttggccacttcaacgctttcttcgctggaggtctggcttgcgttcatcgtggtcacggcttcacgcgagcccacttgcagcgacgtgatcatcttgtgaatttcttcagcagactcctgggtgcggtgggccaggttgcgcacttcatcggccaccacggcgaagccacgcccggcctccccggcacgcgcggcttcgatcgcggcgttgagcgccaacaggttggtttgctgggagatgcctttgatcacatcgaggatgtggccaatgttgtcggtgctcgcgttgagcgtttcgatctgggtacaggacaagctgattttttgcgacagctgcgacatcgccaggatggtttgctccaccaccttgcgcccatcatcagcctgctcgctggcaccgctggcgtgctgcgaagcgtctgcggcgttacgcgcgatttcctgcgtggcggcgccgagctcgttgatcgccgcagcgacactgttggtgcgcgcactttgctcgtccgagccgatgatcgaggcgttggaggatgccatcacccgctgggacagatcgtgtacctgacgtgttgccgaagacacttcggaaatggaagcgtggatacgctcgacaaactgattgaaggcactgcccacttctccaaactcatccttgctggtgacatccaggcggcgagtcaaatcgccttcgccctgagcaatgtcctgcatggcgacgcccatagtggtgagcggacgcagcagtacttgaatcagcaggctcaacaacacggcaatcgagaccaccgcgatcaacatggcgatcaacgccgatgtgcggaatttaccgagtggcgcgtaggctttgtctttgtcgatcgacagaccgatgtaccaatctgcccccggcagaccgctgaccggggtgaacgaaagaatccgatccttgccattgaggacaacatcctgattgaccttctcaatgcgcacgctagtacccgggtagatgtccttcaggtttttcatcacctgatcctggtcagggctgacgatgacctgcccatcggcgctgaccagaaacgcgtggccaataccgccgaaatcgaccgagttgatgatcttcaccagggtttgcaaactcaggtcaccgccgaccacccccagcagttcaccgttttttttgactggcagggcgatggttacgatctgcccacccaccgccgccatgtaaggcggcgtcagcatggttttatcggcggcgacggcttgtttgtaccaaggccgctgacgtgggtcgtaaccgtcaggcatcttggcatccggacgttgcgtgaacacgccgttggtttggccgacataggtgaactggaagttcgaggtgaaagcaggctggtcaaccaaccctggcaggtcggcaccactgccttgatgagcaacgttctgcgccaggctttccagcaccaggattcggccactgagccagttctgcacactgctggcggtgagctcaccggattgctgaatggacgactccaggttttgcttgatggtgctgcgttgcaggtagtcgttgtagagcgtgaataacgcgaaggccaaaaccacaacgcctgacgcggccaacagaattttatgactgaacttgagattcatttcatcgacttcttttgccaaagggggatgagcgtgccgagtggaacattccatgtaacgggataggctagctctgtcggctgctctatttcggtgcacgcatggctcatcaggctttcggccacatctcggcaaatcttagaaaattgtgagaagcatctattttttacgtgggataccgaccaacggtcgcgctctgtggctcagagttgcaaaatccttcggcctttcagacaatgcgactaattatcatttgtggcgtttagccaggcctgtttgaatgccgtcttctgagtacatctcgtgtgaaagtgttgtgcagacgctttacagcacgcatcacaactggctccacacgtggctgcgcagccgcctgggcaacgccgccgatgccgcagaccttgcgcaggacacctttgtacgcctcctgcagaagaccgaacgctttgagttgaaggcacctcgcgccttcctgcgtaccatcgcccgaggcttggtgattgatcattggcggcgcgaggaaatcgaacgcgcttatctcgagtcaatcgcccaactgcctgaagctttagcgcccagccctgaagcacgtgcgttggtgctggagcttctggaggaaatctcccgcctgttggacgggttgaagccaaaagtacgcaaggcgtttctattggctcagtgtgacgggcttacctacaaacagattgcgcaacagatgggtgtttcgctgcgctcagtagaaaggtacgtcgcagacgcgctctatcactgctacatcgtacgttatgaaacctgaccccttggtggtcaggcaggccatcagttgggcactgcgcttgcgtaataaccgtgccaacgtgcgcctgcaggcgcagtgcgaacactggcgcgcagctcacggtgaacatgagctggcctggcaacgggtgcaggcgctgcaacaggaattgagcagccagttgacggcgattcccggagcgcaggcggcgttggaaaacagcgcacaaggcctgggccgacgccaggcactgaaggtgttgtcgggtgtagtgctggtgggatcggcggcctgggtgggtcgagaccttaccggttggccgcgctggacgtccgacctggcgaccgcaacgggcgagcggcggagcgttcaactgcctgacggcactcgcctgcagctcaataccgacactgcggtggatctgaacttcagttcgcaagaacgcctgatcacactggttcgcggcgaaatcctggtgacctgcggtgctgtgtcgccagtgccactgctagtcaacactcggcacagcatgctcgaagggatcgacgggcgttttgctgtgcgtcaggacagagactgcacacgactaaccgtggtcagcggcaacgtggctattcattcgccacacagggcagatgggctgtcgacgcaagttcacaccggtgaaggttaccgagtgcaagagcgtcgggccattctcgcgccctccccagacatggatatgggggcctgggccgatggactgatcgtgacacggggtatgcgtcttgatgagttccttgttgaagtcgggcgttaccggcatggctacctgggctgttcggcagatattgccgacttgcggttgtccggtgttttccgcctggaggacacagacaagctattggcagtgctcgctcaaacactgcccgttcaagtgcgctaccgaacacgatggtgggtgaacctggagcatttggcctgactttttttggcggcttttttccgtgagcccggcttagacagtaagccttcaatctgccttcaccggcctcaacggaccatgatcatgactgtgcgttttcttcgcgaatcttcagacgcttcccaccctcttttggccatagccgtgcgcgcggcagtcttatcgagtgccatgggcatgggggctgttccaatcgcagtcatggctgcacaaacaggcgttgagcgggtcaaccaacgctacgacattcctgccggcccactgagtgatgtactcaatcagttcgcccgtcaggcgggcatcaccctttccagcacacctgcgcagactcagggccgcacatccaccgggcttcgtggcgagtactcgaccgaacagggtttgggtcatgtactcaccggctcggggttgcgggccgattctcaggacggtgtcagttttattctgcgagcgcagcaggaaagcagcacattgacgctgcccgccaccgatatcaaaggcttcgcactgggcaatgccttgggaagcacggaaggctacaacgcgacccacagccagatcgccaccaaaaccagcaccgccctgctggagacgtcgcaaaccgtgtccgtggtaacgcgcgagcagatggacgatcagggctcccagacggttgcccaagccatgcgctacacccctggagtgctgaccaacccctatggtgcgacccatcgttatgactacgtagccatgcgcggtttcaacgatggctctgtggataacatttaccttgatgggttgaagtccatgggggatagcggcacttacagcacgatgcaggtggacccgtattttctcgagcgcgtggacattctgaaaggaccgtcttccgtcttgtatggacgcagctcacccggcggcctggttgcgttgaccagcaagaaaccgctgttcgagccatatcaccaggttcaggtgagcgctggcagccacggccagcagggcatggggtttgacctcaccgggccggtggacgatgacaagcgcatcgcctatcggctgactgggttagcggacaagtccgacactcaattcgaccacaccaaagaaaagcgctacgcactggcacccacgctgagtatcgactttaccgaggatacctcgctgacacttcaggcttatcttcagcatgaccctgacggcggctatcacggtggtatgccggcggatggcgcgttgcatcagcgaaacggcaaccgaatctccagccactttttcgaaggagagccaagcgttgatggctacaaacgtgaccagcagtcgttcggctatcagtttgagcaccggttcgatgatgtatttaccgcacggcaaaacttccgctatctggactccaaggtgcaactggaccaggtgtacgcctatggctggaccacgcccaccagcaatgaactgaaccgttattactcgggaggcgatgagaagctgcatgcgtttatcctcgacaacatgctgcaggcggagtttttcaccgggtcgactaaacatactgtactgatgggggcagactatcagcggcgtaaaacagtggtggattggagcagcggttcgttgcagccaatcaatgcgttcaaccctgtttacggcaattctgctatctcctattacaacccgaccagctacctgcggcggctagagcaaaccggcgtttatctgcaagacctgattgagatggataagtggcggttctcactcgggctgcgtcaggattgggtagagacgtcggatgaaaaccgcattgctgaagcgggtcgccccttgggtaccgaaatcagcgataaacgtaccaagctgacggggcgtgcaggggcgctgtatctatttgataacggcctcgcgccgtatgttagttactcagagtctttcaacccgaactcctactccgacagcgccggcaatcctctggcgccgactaatggaacgcagtgggaagcgggcttgaagtatcaaccgccgggaacggacaacctgtttacagcttcctggtttcgcattgatcaggaaaatctggcgactaaattgcctcaggaaaatttctatcgggctgtaggcgctgttcgttcacaaggccttgagctggaggcgcatctgcaactcaccgacaacctcaagttgctgggcagctacacctttaccgacatcaaatactccaagtcgatggtgagtacattgagctctacggataacctgatcgagaacaaaggcaactctccaacacaggcgcctcgtcatatggcgtcggcgtgggcagactacaagttcaatagcggtgcgctggatggtttgcggtttggaggcggactgcggtacgtcggttatagctgggcagatgccgagaacacgatgaaggtcccggcctataccttgtttgacgcttcggtcggatatgacctgggcaaagtcgggttcaaaggcgtggatgtacgtttgaacgccaacaacctgaccaacgagacgtatgtggcgtcctgtgccagcctgaacttctgctacctgggtgaagagcgtaacgtcagtgcgacggtaagctaccagttctgatttcgttatcgttcaaaccaagccagcgcctgtctaggagcgctggtttttttgcgtgtgcatcgaagggggctaacaaaatcgtttcgagttctacggcccctaaacgacaaaacccctgtctgcattagcaaacaggggtttcggaattcaatcttgacgatgacctactctcacatggggaaaccccacactaccatcggcgatgcatcgtttcactgctgagttcgggatgggatcaggtggttccaatgctctatggtcgtcaagaaattctgtgtaccagttcgtcgcgtcagcaacgcaccggtgaaattcatggacttctacataaacaaaacccctgtttgcgttagcaaacaggggttctggaatttaatcttgacgatgacctactctcacatggggaaaccccacactaccatcggcgatgcatcgtttcactactgagttcgggatgggatcaggtggttccaatgctctatggtcgtcaagaaattcgggtactgagtcgtggcttatgccccgcttcagcaaattgggtatgtgacagctttcggtgttttgtgaacgtcgaactttcggttcatctcgtcttcacacaccgcaatctgatgctcgttagagtagtcaaattgcttgggtgttatatggtcaagcctcacgggcaattagtattggttagctcaacgcctcacagcgcttacacacccaacctatcaacgtcgtagtcttcgacggcccttcagggaactcaaggttccagtgagatctcatcttgaggctagtttcccgcttagatgctttcagcggttatctattccgaacatagctacccggcaatgccactggcgtgacaaccggaacaccagaggttcgtccactccggtcctctcgtactaggagcagcccctctcaaatctcaaacgtccacggcagatagggaccgaactgtctcacgacgttctaaacccagctcgcgtaccactttaaatggcgaacagccatacccttgggaccggcttcagccccaggatgtgatgagccgacatcgaggtgccaaacaccgccgtcgatatgaactcttgggcggtatcagcctgttatccccggagtaccttttatccgttgagcgatggcccttccatacagaaccaccggatcactaagacctactttcgtacctgctcgacgtgtctgtctcgcagtcaagcgcgcttttgcctttatactctacgaccgatttccgaccggtctgagcgcaccttcgtactcctccgttactctttaggaggagaccgccccagtcaaactacccaccatacactgtcctcgatccggataacggacctgagttagaacctcaaagttgccagggtggtatttcaaggatggctccacgcagactggcgtccacgcttcaaagcctcccacctatcctacacaagcaaattcaaagtccagtgcaaagctatagtaaaggttcacggggtctttccgtctagccgcggatacactgcatcttcacagcgatttcaatttcactgagtctcgggtggagacagcgccgccatcgttacgccattcgtgcaggtcggaacttacccgacaaggaatttcgctaccttaggaccgttatagttacggccgccgtttaccggggcttcgatcaagagcttcgcgttagctaaccccatcaattaaccttccggcaccgggcaggcgtcacaccctatacgtccactttcgtgtttgcagagtgctgtgtttttaataaacagtcgcagcggcctggtatcttcgaccggcatgagcttacggagcaagtccttcaccctcaccggcgcaccttctcccgaagttacggtgccattttgcctagttccttcacccgagttctctcaagcgccttggtattctctacccaaccacctgtgtcggtttggggtacggttcctggttacctgaagcttagaagcttttcttggaagcatggcatcaaccacttcgctaactaaaagttagctcgtcatcagctctcggccttaagatcccggatttacctaagatctcagcctaccaccttaaacttggacaaccaacgccaagctggcctagccttctccgtccctccatcgcaataaccagaagtacaggaatattaacctgttttccatcgactacgcttttcagcctcgccttagggaccgactaaccctgcgtcgattaacgttgcgcaggaaaccttggtctttcggcgtgggtgtttttcacacccattgtcgttactcatgtcagcattcgcacttctgatacctccagcaagcttctcaactcaccttcacaggcttacagaacgctcctctaccgcatcacttacgtgatacccgtagcttcggtgtatggtttgagccccgttacatcttccgcgcaggccgactcgactagtgagctattacgctttctttaaagggtggctgcttctaagccaacctcctagctgtctaagccttcccacatcgtttcccacttaaccataactttgggaccttagctgacggtctgggttgtttcccttttcacgacggacgttagcacccgccgtgtgtctcccatgctcggcacttgtaggtattcggagtttgcatcggtttggtaagtcgggatgaccccctagccgaaacagtgctctaccccctacagtgatacatgaggcgctacctaaatagctttcgaggagaaccagctatctccgagcttgattagcctttcactccgatccacaggtcatccgctaacttttcaacggtagtcggttcggtcctccagttagtgttacccaaccttcaacctgcccatggatagatcgcccggtttcgggtctattcccagcgactagacgccctattaagactcgctttcgctacgcctcccctattcggttaagctcgccactgaaaataagtcgctgacccattatacaaaaggtacgcagtcacagaacaaagtctgctcccactgcttgtacgcatacggtttcaggatctatttcactcccctctccggggttcttttcgcctttccctcacggtactagttcactatcggtcagtcagtagtatttagccttggaggatggtccccccatattcagacaaagtttctcgtgctccgtcctactcgatttcatgactaagagattttcgcgtacagggctatcacccactatggccgcactttccagagcgttccgctaatctcaaagccacttaagggctagtccccgttcgctcgccactactaagggaatctcggttgatttcttttcctcagggtacttagatgtttcagttcccctggttcgcctcttacgcctatgtattcagcgtaagataaccatcttatgatggctgggttcccccattcagacatctccggatcaaagtctgtttgccgactccccgaagcttttcgcaggctaccacgtctttcatcgcctctgactgccaaggcatccaccgtatgcgcttcttcacttgaccatataaccccaagcaatctggttatactgtgaagacaacattcgccgaaaattcgaatttctcaactaagagaactcacaaattttaccttagcctgatccgttaccagtgaaagtaacgttcagtctatctttctatcacatacccaaatttttaaagaacgatctaatcaaagactagaaatcaacattcaccatcaacctgatggaatgctcatttctaagctttcataacgtagaagcagtagtggtggagccaaacgggatcgaaccgttgacctcctgcgtgcaaggcaggcgctctcccagctgagctatggccccgtatttctacaggcgtttcccacacaaaattggtgggtctgggcagattcgaactgccgacctcacccttatcaggggtgcgctctaaccaactgagctacagacccaatttcgggctgcttcttatcgtcttcttcaatgaatcaagcaattcgtgtgggaacttatggagcagctgatgtcgtcgattaaggaggtgatccagccgcaggttcccctacggctaccttgttacgacttcaccccagtcatgaatcacaccgtggtaaccgtcctcccgaaggttagactagctacttctggtgcaacccactcccatggtgtgacgggcggtgtgtacaaggcccgggaacgtattcaccgcgacattctgattcgcgattactagcgattccgacttcacgcagtcgagttgcagactgcgatccggactacgatcggttttatgggattagctccacctcgcggcttggcaaccctctgtaccgaccattgtagcacgtgtgtagcccaggccgtaagggccatgatgacttgacgtcatccccaccttcctccggtttgtcaccggcagtctccttagagtgcccaccataacgtgctggtaactaaggacaagggttgcgctcgttacgggacttaacccaacatctcacgacacgagctgacgacagccatgcagcacctgtctcaatgttcccgaaggcaccaatccatctctggaaagttcattggatgtcaaggcctggtaaggttcttcgcgttgcttcgaattaaaccacatgctccaccgcttgtgcgggcccccgtcaattcatttgagttttaaccttgcggccgtactccccaggcggtcaacttaatgcgttagctgcgccactaaaagctcaaggcttccaacggctagttgacatcgtttacggcgtggactaccagggtatctaatcctgtttgctccccacgctttcgcacctcagtgtcagtattagtccaggtggtcgccttcgccactggtgttccttcctatatctacgcatttcaccgctacacaggaaattccaccaccctctaccatactctagtcagtcagttttgaatgcagttcccaggttgagcccggggatttcacatccaacttaacaaaccacctacgcgcgctttacgcccagtaattccgattaacgcttgcaccctctgtattaccgcggctgctggcacagagttagccggtgcttattctgtcggtaacgtcaaaattgcagagtattaatctacaacccttcctcccaacttaaagtgctttacaatccgaagaccttcttcacacacgcggcatggctggatcaggctttcgcccattgtccaatattccccactgctgcctcccgtaggagtctggaccgtgtctcagttccagtgtgactgatcatcctctcagaccagttacggatcgtcgccttggtgagccattacctcaccaactagctaatccgacctaggctcatctgatagcgcaaggcccgaaggtcccctgctttctcccgtaggacgtatgcggtattagcgtccgtttccgaacgttatcccccactaccaggcagattcctaggcattactcacccgtccgccgctctcaagagaagcaagcttctctctaccgctcgacttgcatgtgttaggcctgccgccagcgttcaatctgagccatgatcaaactcttcagttcaaacatctttgggtttttaagaaaccctaaacttggctcagcaatcgttggttacatctttgatttctcgcggagtaacttgtgatgctgataatcttgttgactatcagtctgactccacaagcacccacacgaattgcttgattcagttgttaaagagcggttggttaagatctttcgtctcaaccgaggcgcgcattctacagcagcctcatttgctgtcaagtgattattttcagaagttttcgaagatttcttcaacaacttcaaccacttgcgcttccgatctctcgttagcgggaggcgaattctacagcgttacacgctgctgtcaacacctctttttctccgctttcgaccgagaggatcgaaacgttaatagagccaaactacaccgctctatcaactccttctgggcttcgatgaactgaagcaactcactgtcgaatctcgcataactctttgtttaccaaggagttttccgtttcgactgcgccggaagtggggcgaattatagacttccagaatctgccgtcaacccctaattttgcttttctatcaattagttaggattgattaaaaaaccaccagaaacctcgtaaattccctctatatagaagagagcattcagataacccccaacagccttaactcagccacggttgcagcccccagccccaatacgtcctgcaacacttgcgcggtgtgctctcccaatagaggaggcgcactgcggtactcaacaggcgtcttggacaaccgtatcgggctggccacctggggcaccatgccagccagtgcatgcggcatcgccatcgccaacccacgcgccttcacctgaggatcggcaaacacctgcgccagatcattgatcggcccgcacggcacacccacttgctctaactgcgacacccactcagccgtcgtcttgaagacagtcgcctggcgaatcagcggaatcagctccgcccggttggcgacccgcaccttattagtagcgaagcgcggatcgtccgcccactgcggctgcccagccacctcggcaaacttgcgaaactgcccgtcattacccaccgtcagaatgaagtcaccgtcagcagtgggaaagtcctgataaggcacgatattcggatgtgcattacccaaccgtttcggcgacacacccgttgtcagataattcatagcctggttagccaggcaagccacctgcacatccagcaatgccatatcgatatgctgcccaccgccatcatggtctcgatgagcgagcgccgcgagaatcgctaccgttgaatacaggcctgtcagaatgtcggtcaacgcaacaccaaccttgaccggacccgcaccgtcatccccctcaggccgaccagtgaggctcataagcccaccgagcccctgaatcataaagtcatagcctgcccgcgcggcgtaaggccccgtctggccaaaaccggtgatcgagcagtagatcaactccggattgatctccttcagcgattcataatccaacccgtatgcggcaaggccgcctaccttgaagttctcgatgagaatgtcggacttggctgccaggtcacgcaccaacttctgcccctccggccgcgtgaagtcgatggtcaccgactccttgttgcggttggccgacaggtaatacgccgcctcgctggtattttcaccataggcatccttaaggaagggcggcccccacgcacgcgtgtcgtcaccattacccggtcgctcgaccttgatgacttcagccccaaggtccgcaagaatctgcccggaccaggggcccgccagcactcgcgataaatccagtacccgcagatgtgaaagcgcgcccatgccgtgctcctattaatagaaagcctgaagaccggtttgagcgcgcccgagaatcaaggcgtgcacgtcatgggtaccctcataggtattcaccacctccagattgaccaggtgacgcgccaccccgaattcgtcggaaatgccgttcccccccagcatgtcacgcgccatgcgcgcaatatccaacgacttgccgcacgaattgcgcttcatgatcgaggtgatctcgaccgccgccgtgccttcgtccttcatgcgccccaaacgcaggcatccttgcagcgcaagggtgatttcggtctgcatgtcggccagctttttctggatcaactgagtagccgccagtggacgaccgaactgctgacgatcaagggtgtactggcgagcggtatgccagcagaactccgcagcacccaaagcgccccaggagataccgtagcgcgccgaattaaggcaggtgaaagggcctttcaagccacgcacgtccgggaaaatgttctcctccggcacaaacacgttatccatgacgatctcgccggtaatggaggcccgcaagccaaccttgccgtgaatcgccggagcactcagccccttccaacctttctccaggacaaacccacgaatatcgccggcgtcgtccttgccccacaccacaaacacatctgcgatagggctgttggtgatccacattttggcgcccgtgaggctgtagccgccgtccaccttgcgtgcgcgggtaatcatcgcgcccgggtcagaaccgtgatctggctcagtcagaccaaagcagccgatccactcaccagaagccaatttcggcaggtacttctgcttctgcgcctcggtgccgaattcattgataggcaccatgaccagtgaagactgcacactcatcatcgagcgataaccggagtcgacacgctcgacttcacgggcgatcaatccatagctgacgtaattcaagccactgccaccgtattgctccggaatcatcgcacccaacaagccgatttcacccatctctcggaagatcgcagggtcggtctgttcatggcggaaggcctccagcacacgcggcgccagtttgtcctgggcgaactgctcagcactgtcacgcaccatgcgctcttctgctgtgagttgttgatccagcagcagtggatcaatccagttgaagcttgccttgccagccatgaataagccctcgagaagaaatcagaagtcgtagaagcagactaggccgggcaggcgaggagggcaaacgaggtttcagcatagggttgtgctagtttctcacttcggaatcgccgtaaatggcatatatgcgttttataagtgagcacaacgtacatgcgcagaaaaattcccagcaccacagcactcgtcagttttgaagccgcagcccgccacgagagctttaccaaggcggcgaatgagctttccatcactcagggcgcgatttgccgacaaatcgcgagccttgaagagtttttgagtgtcgagctgtttcgacgctcacggcgcggggtcaagctgaccgaggccggactgtcttatagccgtcgcgtggccatgcaattggacgcggtggagcgcgataccttgtccgttatgggccaacagggcaccaatgttatcgagttggcggtggtgcccaccttcggcacccaatggctgattccccgccttaaggactttcaaagcaaacacccggaagtcacggtcaacctcaccaaccgcacgcgcccgtttctgttcgccgataccgagttcgacgccgcaatctactttggcgatgccgactggtcaggcaccgaatcccaccgcctgatgggagaaaaccctgtccccgtgtgcagccctcgactgctcggctctcgcagtcgcttcagcccccaggaaatcgcggagctgccactgctgcaacaaaccacccggccctacgcctggcgccaatggttcaacgccaagcaactgaacatacctcgcgacatgacaggcccccgttacgagctattctcgatgttgtcccaggccgccatgcatgacatggggatcgcgctgattcctccgttcctcattcagcgcgagctggacgagaagcaattggtgatcgcaaaccccgagacgctgaccagttcgaaggcgtattacctgatgatccccgaaagaaaggtcgagtcggcgtcactccacgcgttccgagactggctgattgaccaatcgcaacgctacagccctcggatttaaaggggaggccgtctacttgaccttgtagtcagttatttttaaatactacagatatacatatatgtcgcatttaaacagactgtacctgtcaatcaaaaatctcgctcaacgccatgattatcatggcctccagcgactattacctgccaatgcacgaccattcacgccaaccatgaaaaaacacgctataaacacctgaagccctttaaacacctgtatttaaagaggttatttcagggtgttgcgacaatcagtcacagggtgacttgtagttaatttttcgtcacccgtcataatcccttgatggccgtaaagttcgcctgcaaaatgccgcgccccgctgtcatttcagcgggatcgtgctgatcggccgccccagatgcgccactcacggtgcactggcctttttacaaaaagatcaaaagcaaaaagatcatgcaggagatttgacgtgcacattggtgttcctctcgaaacccagaccggtgaaacgcgggtggctgccaccccggaaaccatcaagaagctgatcggccagggccataaggtcactgtacaaagcggcgcaggtattaacgccagcatcgtcgacagtgcctatgaaacggcaggcgcaaccattggcagcgccaacgatgcgtttggcgcagagctgattctcaaggtggttgcccccagcgacagcgaactggcgctgatcaaaagcggcaccgtgttggtgggcatgctcaatccgttcagcaacgaaaccatcgccaggctggccgaatgcggcattaccgctttcgccctcgaagccgcgccgcgtacctcacgagcccaaagcctcgacgtgctgtcttcccaggccaatatcgccggttacaaggccgtgctgctcgccgcgcatcactacccgcgcttcatgccgatgctgatgacggcggccggcacggttaaggcagcacgcgtgctgatcctcggcgcgggcgtcgcaggcctgcaggcgattgcaacagcgaaacgtctgggtgccgtgattgaagcgtctgacgtccgcccggccgtgaaagaacagatcgaatccctcggcgccaagttcgtcgacgtgccctacgaaaccgatgaagaacgcgaatgcgctgtcggcgtcggcggttacgcacgccctatgccaagcagttggatgcaacgccaggccgtggccgtacacgagcgcgcaaagcttgccgatatcgtgatcaccaccgcgctgatcccgggccgcaaggcaccgaccctgctgagcgccgaaactgtcgcgcagatgaagcccggctcggtggtcatcgacctcgccgccgcccaaggcggcaactgcccactgaccgttgccgaccaggttgtagtggagaacggcgtgatcatttgcggcccgaccaacctctccggtgccgtcgctgccgacgcttcggccttgtacgcgcgcaacctgctggacttcctgaagctggtcttcaacaaggaagggcagtttgaaatcaacctcgaagacgacatcgtcgccgcgtgcctgatgtgccgcgacagccaagtcatccgcaaaaacgcctaagcagggattcagacgatggaagagcttatctcccccggtatctacaacctgatcatctttgtgctggcgatttatgtcggttaccacgtggtctggaacgtaacgcccgcgctgcacacgccgttgatggccgtgaccaacgcgatttccgcgatcgtgatcgtcggcgccatgctggccgccgccctcaccgtgaccccgctgggcaagaccatgggtactttggctgtcgcattagcggcggtgaatgtgttcggcggcttcctggttacacgtaggatgcttgagatgttcaagaagaaagcgcccaaagctgtgaaagaagaggtgcagaagtaatgagcatgaatctggtaacgacgctgtatctgatcgcgtcgatctgcttcatccaggccctcaaaggcctgtcgcaccccaccacctcgcgacgcggcaacctgttcggcatgctcggcatggcgctggcggtactcaccaccgtaggcctcatctataagttgggcgctgaactggcgactgccggcatcggttatgtgattgtcggcttgctgatcggcggcaccgccggctcgatcatggccaagcgcgtagaaatgaccaagatgccggagctggtagcgttcatgcacagcatgatcggcctggcggcggtgtttatcgccatcgccgcggtggtcgagccgcaatcgttgggtatcgtcaaacacctgggcgactcgatccctgcgggcaaccgtctggagctgttcctcggcgcagccatcggtgccatcaccttctccggttcggtgattgccttcggcaagctgtcgggcaagtacaagtttcgcctgttccagggcgcaccggtacagttcggcggccaacacaaactgaacctggtactgggcatggcaacactcggcctgggcttggcgttcatgttcaccggcaacctcactgccttcacgctgatgctggccctggccttcgtgctcggcgtgctgatcatcatcccgatcggcggcgccgacatgccagtggtggtgtcgatgctcaacagctactccggctgggcagcggcgggtatcggcttctcgctgaacaactcgatgctgatcatcgccggctccctggtgggctccagcggcgcgatcctgtcgtacatcatgtgcaaggcgatgaaccgttccttctttaatgtactgctcggcggtttcggcaatacctcggatgccgctgcggcaaccggctctaaagaagcgcggccagtgaagtccggctcggctgacgacgccacgttcctgctgaccaatgccgacaccgtgatcatcgttccgggctatggcctggcggtcgcccgggcacagcatgcactcaaggaactgaccgagaagctgacccaccacggcgtcaccgtgaagtacgcgatccacccggtggccggccgtatgcccgggcacatgaacgttctgctcgccgaggccgaagtaccttacgaccaggtgttcgagatggaagacatcaactccgagttcggccaggccgacgtggtgctggtactcggcgcaaacgacgtggtcaacccggccgccaagaatgatccgaactcgccgattgccggcatgccgatcctcgaagcgttcaaggccaagaccatcatcgtcaacaagcgctccatggccagcggttatgccggcctggataacgagttgttctacctcgacaagaccatgatggtcttcggagatgccaaaaaggtcatcgaagacatggtcaaggccgtcgaataaccctgcgccagcgcaatacaaaaaaccctggcctcccgtaggctggggttttttattgccgcatgaaacccgaccaaaggctctaaatcgccgcctggcattcgaccatggtagcgggccgaatttttttgaaatcactaaactgcgaaccttgcttccgtagcctgagataacaatccatgtaccgtgatcgtatccgcttgccttcgttgttgaacaaggtcatgagcgcggcagacgccgccgcactgatcgaggacggcatgaccgtcggcatgagcggcttcacccgtgccggtgaagccaaggccgtcccccacgccctggccgaacgcgccaagacttccccgctgaaaatcactttgatgaccggcgccagcctgggcaatgacctggacaagcaactgaccgaagccggcgtgctgtcgcgccgcatgccgttccaggtcgacagcacgttgcgccgcgcaatcaacgccggcgaagtgatgtttatcgaccaacatttgtccgaaaccgtcgagcaactgcgcaacaatcagctcaagttgccggacatcgccgtgatcgaagcggttgccatcaccgaacaagggcatatcgtgccgaccacctccgtgggcaactcggccagtttcgcgatttttgccaagcaggtgatcgtcgagatcaacctcgcgcacaacccgaacctggaagggctgcacgacatctatatcccgacctaccggccaactcgcacgccgatcccgctggtgaaagtcgacgaccgtattggcagcaccgcgattccgattccgccggaaaagatcgtcgccatcgtcatcaccaaccaggccgactccgcgtccaccgtgacgccgccggacgccgatacccaaggcatcgccaaccacctgatcaacttcctcaagcaggaagtggacgcagggcgcatgaccaataagctcggcccgctgcaggccgggatcggcaacatcgccaatgccgtgatgtgtggcctgatcgaatcaccgttcgaagacctgaccatgtactcggaagtgctgcaggactcaactttcgatctgattgatgccggcaagctgagctttgcttccggcagctcgatcaccttgtcggaacgccgcaatgccgacgtgttcggcaatctggagcactataaagacaagctggtgctgcgccctcaggaaatctccaaccacccggaggtggtgcgtcgcctgggcattatcggcatcaacacggcgttggagttcgacatctatggcaacgtcaactccacccacgtttgcggcacgcggatgatgaacgggatcggcggctcaggggatttcgcacgcaatgcgcacttggcgatcttcgttaccaagtcgattgccaagggtggcgcgatttccagcgttgtgccgatggtcagccatgtggatcacaccgaacacgacgtggacatcctcgtgaccgaggtcggcctggccgacctgcgcggcctggcgccacgcgagcgtgcgcgagtgatcatcgacaactgtgtgcaccccgcgtaccgcgacgccctgaacagttatttcaacgccgcctgcgccatcgggggccacacgccgcacatcctgcgtgaagcactgagttggcacatcaacctggaagaaaccgggcacatgctcaaggcgtgattgatacagatgcgggctgatgcaaacacagtttcatcagctcgataccctagcgagccgtttcttaaaaaactgtactgctgtaccggtcttttcctaccgaaatatcctactcacatcattgaaaatgcctatttcgcactatttcagtgcggacaggtacagttgccccatttctgtacagtacagcccctataaacagttaactgggccctcacaatacaggtgaactgtatctggagagtcttgcgccggaagaggatcattggcatcagttaaaccactacctaatcccgccacaagcggaaggatgtcatcatggaacgtacactcagttccgatctgttcttcgaagaaaaagctgtaaacacccaggcttccatgcctctgcgcgttctcgccaacctgatgttgtggcagcgccgcatctccagccgccaccaactggctcgtctggattcgcgtctgctggctgacgccggtatcagcgaagctcaacgctacgaagagctgagcaagccgttctggcgctgatttagcgctcgctggccctgacctgtcgggtccactgccagcaacctgatttgtcaaaacaaagcccgccccgggaaaccggaggcgggctttgttgtttctgacgtttgggtttgaaaggccgaaccaaaggcgaaaacccaagacaggtacagtttaaaaaacataacaattcagcagtacaatttaacttcaacgcatctgtatcacttccccaacggataaacggcagcttaagatccactccccacgtggcgaaccttgtagagcgggcgtctgatgctcaaagcaacaatgtccgtttcacagtggccgtttggcgccgctttaattgttcatctacaggagtcattccatgtcccgtcttcgcctgctgagtgttgccgccctgttggccgctgccgccaatgccagcgcctccagcctcatcgtgaccaccgattcgatcgtcggcgcattgaaagccacttccgatgccagctccgacgccacgtcctccctgcgtgacaacaaagtcgtgcaggccgcccgcgatgacgccgccagtttcgtcgccagcgaaggcgccatccgtggcgtgaagctggaaagcgccctggcacagatccgccaacaagcgccacagctgagcagtgcgactgacacgcaactggcccaagccattctggtaatttaacggcagatgaaatttggaagcgccagccgcttccaaatgtgtcaacgctggccctcgccggggcattaggctagccttggcgctcgctttcagttgtcgagtcccatggctttttcttaccgcctgttgattgttcccgtattgatttctgcctgctggtcgcccttggtttcggcctttgatatgaccacccagaacaccgtcatcagtgtgtacgccaccagcaaggtgacttccgcaccctttgacaagaagttagtcatggccgcccaggatgacgctgccgcgtttatcgccaccgatggccaatggcggggcgcacggctggaatccgcactggattacctgcgccgcacccagccaaaacttaacgccagcgaccttgaactggcgcaagcaattctcgtccaataatcatcttagtattctggagtcattccatgcgtagcccgctgatcgccgccgctctcggcctgctgttgttggccgatgttgcccacgcgcaaaccctgaaagccaccagcaacatcatcgtgcgtgcttccgcgcgcaccattgatttcacctcggacaccacgacctcgatccgcgactccaaaatcgtgcgcgaagcccacgatgacgccgccagcttcgtcgcctccaatggcgaaatccgtggcgcgcaactggaggccgccttcgacaccctgcgcacccgcgtgccggaagcccgcgatgccagtgaccagacgctcgccgaagctatcctcgctctgtgaggcgcctggcggcctggctcctggccgggactgtgctgctctgtgcaggcgcagcccaggccagcctgcacctgcggctcaagaccgatggcttgagcccggctgaacagcaggccagccaggccttgctcgatgaagcgatgcgctcgttaccgccgcgctttatcgagcaactggaccggaccatcgatgtcggctggaccgacaagatgcccgaaaacgcctacggccaagcttccttggtatccgagctggacctgaatcagaacctgctcgccagcctgaccgacggcagcgccgccacccagaagaccaatcgcccccacggcaccgtgcgccgcgaaatgctcgccaccgtgctgcatgaactgacccacatctatgaccgcgcgcgcctgtggaccaaagaagaccgcacgctgatcaaccgctgcagtcgccagaacaaactcaccggcctgatcggcttgcccgatcaatgccgtggccagaacgatcgccgcttcaccctcagcgacgacccgcgcctgctcgacctcgccggctggccccaatacgtgggccgtcgcggtgaacgcgagcaaaacaaccaccaggtcgcccgcagcccggacatctacgaaaccaccagcccgctggagttcgtggcggtcaacatggagtatttcctcctcgaccccagctacgcctgccgtcgcccctcgctgtttcgctattacaaggaacacttcggctgggcgccgcccgagcaagacacctgcgccaagacctacgctttcctgaacgcgggcaatgattttgccaagactccgctgggccagatcgacccggagcgcgtctacgagatcgactacctgctggccgaagccaatgaaaacctggtcagccgctggggccacagcatgttgcgcctggtgatctgcgcacccggtcgcccacgtggtccggattgccggctggatctggaccagcacttggtgctgtcctatcgcgcctttgtcggcgacgtacagctgtcgagctgggatggcctggtcggcaaatacccctcgcgcctgtttgtattgccgttggcccaagtgatcgacgaatacaccaagaccgagttgcggggtctcgcctccgtgccgctgaagctctcacgccaggaaatcaacgataccgtcgagcacgccgccgaaatgcactggagctacgacggtaactactttttcatttccaacaactgcgcagtggagagcctgaagctgctgcgcagtggcagcgccaacccgcaattgaccggcctggacaacatcactcccaacgggttgctggaagtcctcgctgcacgcggcctggcagataccagcgtgttgaacgacaagcgcgaggcgctgcgcctgggctatcacttcgactcgttccgcgaacgctaccaggcgatgttcgacgtgctgcgtaaacacctgccgatcaaacagacccgggttgaagactggctgtccctcagcgccgctgaacgccgacagtggttcggccaggccgacttgcgcaccagcgccgcgctgttgctgctggaacaggccagctatcgcaagcaactgatgctggcccaggatgaagtcaaacaacgctacctcagtgcccgtgagctgaaaaatggcgggatggagaaggccaacaacacgctgcaacaaattctcgccaacagcggcttcctcagccgcccggccgagctgctcggcagtggcggctacggcctgccgcaaccgtcggaatccaaacgcctggaatcggaaagcgcccaacgccagaaacagctgcagtcgctgactggcgatctggataaagaggttagggcgctgctcgacccttcccgcgccgacgaaatcgccgcttgcgaggccaacctcaagcagatgggtgagcatctgcgcgccttgcacaaagcagccggcggcctcgaactgccctgatcaacgggcggcaaacactcatctaatgtgggcgctggcttgcctgcgatagcggtgggccagacacctcaaatgctgaatgtgccgacgccatcgcaggcaagccagctcccacattttatctgcgtatgccgaacgaccgtgtgtccccggttttcccagcgaaagctggctgaaagcttccccgtctaggatcgcccccactgccggcaacagaccggctgttaacaacaacaatggtgattcccgatgtccgttccgacccacctgcttgccccaactccgcccgtacgcctcgtgcctttcgctctgcgctgaccccacccggttcgccattccctagccgcgctacgcctggagtattcctatgctgactttccttggctttgccatggtcatcacgttcatgttcctgatcatgaccaagcgcctgtctgcgctgatcgctctgatcattgtgcccatcctgttcgcgctgttcggcggtttcgccccgcagatcggccctatgatgcttgcgggcatcaccaagcttgcgccgaccggcgtgatgctgatgtttgccatcctctactttgccctgatgatcgactccggcctgttcgacccggccgtgcgcaagatcctcaagatggtcaagggcgacccgctgaaagtgtcggtcggcaccgccgtactggcattggtcgtttctctcgacggtgacggcgccaccacctacatgatctgcgtggcggccatgttgccgctgtaccagcgtatcggcatgagcccacggatcatggccggcctgatcatcctcgccggcggcgtgatgaacatgaccccttggggtggcccgaccgcccgcgccgccagtgcgctgcatgtggacccgtcggatattttcgtaccgatgattccggccatggctgctggcgtggtggcgatcctggtgattgcctacatgtatggcaagcgcgagcgggcacgcctgggcgagctgcacctgcagggcgatgagatcgaccacagcgagatcagtgtctcgcagtacccggatgcccgccgtccaaaactgatctggttcaacggcgccctgaccttcgcactgatgtgcaccctgatcgccggcctgctgccgctgccggtgctgttcatggtggcgttcagtatcgccatgatcgtcaactacccgtgcctgcaaatgcagaaagaccgcgtcgccgcccactccggcagcgtattggcggtggtggggctgatcttcgcggccggtatcttcaccggcattctgtcgggcaccggcatggtcgatgccatgtccaagagcctgctggccgtcatcccggatgcgctgggcccgtacctggccgtgatcaccgcgctggtgagcatgccgtttacgttcttcatgtccaacgatgcgttctactatggcgtgttgcccgtactcgccgaagccgccagccactacggcatcactgccgcggaaatggggcgtgcgtccatcgtcggccaacccgtgcacctgctgagcccgctggtaccctcgacctacctgctggtggccttggccggtatcgaatttggcgatcaccagcgctttaccctcaagtgggcagtgctggtatgcctgtgcataatggtcgccgctttgctgatggggattattccgctgttcagcacactataatcctacacacccaaccgcgcggcgctgcagcttgcgcggtttaacattcgctcaaaggaatacacatggaatggctgaccaatccggagatctggattgccttcttcaccctgacggccctcgagatcgtcctgggcatcgataacatcatcatgatttcgatcctggtcagccgcatgcccaagcatatgcaagcgcgcacccggatcttcggcctggcgctggccatggtcacgcgaatcctgctgctgctgtcgatcacctgggtgatgcaactcaccgccgatttgttcgtggtgtttggccaaggcatttccggtcgcgacctgattctgttcttcggtggcctgttcctgctgtggaaaagctcccaggagatgtaccacgcactggaaggtgaagacgaaacccacgacgagccgaaaggcgcgggtggcaaattcatctacaccatcatccagatcgcaatcatcgacatcgtgttctccctggactcggtgatcaccgccgtcggcatggtctcccatgtgccggtcatggtggcggcaattgtcgtcgcggtgctggtgatgatgctggctgccggcaccatcagcgaattcatcgacaagcacccgtcgctgaaaatgctcgcgctgtcgttcctgctggtggtgggtaccgtgctgatcgccgaatcgttcgacgtgcacgtgccaaaaggctacgtctacttcgccatggcgttctcgctggcggtggaagcggtgaacatcaagatgcgcaccgcgatcgcgaaaaagaagaaacagcaggatccagtgaaactgcgcaaggacattccgggtcaataaaaatgatccgctgctgaaaaggggctttcgagcccctttttttcatctgcaaaaagctgatttcatgacagttttgtttcaatcccgactttagctatgcgatgctggcgcacagcccactcgccaactacagcttaagtacaagacgtagaacggcacgcggcaactttccttcgctcctttttggagtgcacccacacggggggccgagcatgctgaccttgctcaatctgctttccgccgtgaccctgcttatctggggcacgcacatcgtccgtaccggcatcttgcgggtctacggttccaacttgcgccaagtcatcgggcagaacatgtccaagcgctggctggcgtttatcgccggtatcctggtgaccgccatggtgcagagcagtaacgccacggcaatgctggtgacatccttcgtcggccaaggcctgatggggctgatgcccgcactggcaaccatgctcggtgccgacgtcggtaccgcgctgatggcgcgggtgctgacgtttgacttgtcctggctgtcgccactgctgatttttctcggggtgattttctttctgtcgcgcaaacagacgcgggcagggcagatgggtcgcgtcggaatcggcctgggcctgatcattctggcactgcaattgatcgtcgaagccgccgggccgattacccacgcccaaggcgtgaaagtcatcttcgcctcgctgaccggcgatatcttgctcgacgccttggtcggcgctctgttcgcaatggtttcctactccagcctggccgccgtgctgttgacggccacactggccggcgccggtgtcatcggcctgcacgtggccatcggcctggtgatcggcgccaacatcggcagcggcgtgctggccttcctcagcaccaacatgcaaaacgccgctggccgccaagtggccttgggcagcctgctgtacaaactgatcggcttgctgctgatcatcccggtactcgaccctctcgtgcgctggatggacggcctggactacagcgcccaaggcatggtcatcaccttccacgtgctctacaacaccagccgctgcctgatcctgctgccgaccattggcccgatggcccgcctgtgtgcctggttgttgccggaacagccggagctcaacggcaaagccaagccgcgccacctggacctggcttcactcgccaccccaagcctggccctggccaacgccgcccgggaaaccctgcgcctgggtgacctgatcgacaacatgctcaccgccatgctcgaagtgctgcgtggcaaacaaaccgccatcacccaagagatacgcagcctcagcgatgacgtcgaagccctgtacagcgcgatcaagctctacctcgcgcaaatgccccgcgaggacctcagtgaacaggacagccggcgctgggccgagattatcgaactgtcgattaatctcaaactggccggcgacctgatcgagcgcatgctgcgcaaagttcagcagcagaaaacttcgcaacgtcgccagttttcggaagtcggcctggaagaactcgccggcctgcacagccagttgatcgccaacctgcgcctgggcctgtcggtattcctcagtgccgacccggaaagcgcgcgccagttgctgcgcgagaagcgccgcttccgcgcccaggaacgccgcctggcccacgcccacgtcagccgcttgcagcgcaaaatcgtccagagcctggaaaccagctccctgcacctggagttgattgccgacatgaaacgcctaaactcgctgttctgcagcagcgcctatgtggtgctggaaacctccgacaccggcgcactctccgccgaagacattgccgacatcacccattcgccctgaacgtacgatggcccgtgaagtcagttaaaactgacctcactcgccaggaagcttgttatgcgtcgcctgttattggcctgcctgctcatgggctctgctcaatcctttgcctttgaccgcctgcaagtcgagggctacaccttgcccaacggcctgcaattgctgctcaaaccgggcaccgagcgcgggcacgtggccattcgcctggtggtgggtgtagggctggatgacttcacctgcgaggaaaaggagctgccgcacctgctcgaacatttgctgttcagcggtatcgacggcggcggcgaaggcgaccttgaagaccgcatgcaagcgctgggcggcgagtggaacgcctacaccagcaatgccgacaccaccttcgtgatcgaagcgcccgcgcaaaaccagcgcaaggtgctcgatctgttgctggcaatcatcacccgcacccaactgaccgatgccaatatcgatgccgccaagcaagtggtcgagcgcgaagacggcggccattactcgcacctgcaacgcctgcttgaccgccaggacctgggccacacggccagcaatcaactggccgtggagttggggctcaaatgtgccgaacgcgccgaggtcggccacattactcgtgaccagttagagacgttgcgcaaaaactggtacgcgcccaacaacatgaccctgatcatcgtcggcgacctcgacaagctgctccccgcctacctggaacggacttatggccaactggacccggtggaaccgagcgagcatctgccgttgccgcaaatccagcacgctgccgccagccaacgcaatctgatccacggctgggtgggtgacagtgccaagctgcactggctatttccagagccggtgctggacgatggccatgacgaaacctacgacctgctcaaggactacctcgattgggccctgtatcgccaactgcgcctgcagcatggtttgtcctacgggccgtggagcgaacgcgaagtgctgggtggcgtcgggttcctgagcctgaatgccgaccttgagcgcgacaaacttcccgaggccgaaaaagtgctgcaagacctcaaggcccagttgctcaaggacggcctcgacccagccacctttacccgcctgcaacacgccgccatcgcacgccaggcctgggccgttcaaggtaatagcgcgctggccgactactactggagcgcctccggcgactacaacggcgaccacttcagcgacccggtcaaaaggatcaaggcggtgagcctggaacaaaccgaccaagccatgcgtcaagtgtttaaccagcccggttactggcgcattgaaaaaccgctgctgagctacgacagcctgagctggatcggcgccggcgtgctcgcgctgatcgccattgtgttgggcggcgtgcggttttatcgcaaacgcgtcgcgtaatgaggcaccgaacacagggctaagacgttattctgtctgggttttttcctacaccaaatgtgaaccgccaatgccaagcctgccgccccttatccagcgcattctcgtcctgatcaagcgctacccaggggtgatcgcgctcggtggtttcatttcaggtgtgtgcagcttcatcctggtagaccgccagcaaggcatggccagctggattgccgtcatcatgctggtgagctggctatggctgatgctggaaaacagctttacccagctgttcgccaaagtgttcaaacgggaaatccccgagccgctactgcgctacgccacccaaatgattcaccaggaaagcctgttcttcgtgttgccgttctttttcgtcaccacggcgtggaacagcggccagtcggtgttcaccggcctgctcagcgcggcggcgctggtctcgatcaccgacccgctgtattacaagtggctggcgcccaggcgctcgctgttcctggcgctgcacaccctgactctgttcgccgcgctgctcaccgcgttgccgatcatcttgcacctgaccacagccgaaagttacaaattggccctgggcgtggccatggcgctgtcgatcccgagcctcgccaccagcctgccgctacgcagcatcaaaggttgggcgatgctgctgggggtcacggccgccattggctgcgccggttggttcctgcgcagttgggtaccgccggcaacactgtggatgaccgaagtagccatcagcacccagttgcaagaccgcacaccgggtgatgacctcaaggaagtcaccgccgcccaactgcgcagcggcgggctgtatgcctacaccgcgatcaacgcgccgcgcgggctcgatgagcggatttaccacgtgtggaaattcaacggccaggaagtcgaccgcatcgccctggatatccacggcgggcgcaaggaaggctaccgcgcctggacccacaaacagaacttcccggccgatgccgtcggccgctggcaagtgcgggtattgaccgaagacgggcaggtgatcggcgtgctgcgcttcaaagtgactgacacagcacaaacggacaacccaaagtaggctggatcgtgctattacgtagcatttgtggatagccaaacaagctcggagcttatgaccaccagcacgacggccggcgccgcccacctcgacacctcgaccactccgccattactgaggattacgggggactggacgcttgcccactacgccaacctgaaaaagctgtcggacaccctcgatggcaagtacgacgcaggcgctcgcattgacctcaatggcctcggcgctctggacaccgccggtgcctcgctgctggtggagctgctgggcccgacccgtatcgaacagtccgccgagcaaaccgattgcagcctgtccaccgccgaccgcgcgctgctcaagaccgtctaccgctccctcaatgatttttgcgtgcccgacaaagccccggaagaggccgccggcattcaggtgttggcacgcatcggccgcgcggtggatacggtctggcaagacagcaagaaactgctcggctttatcggcctgatcctggagaccttcgcccggggcattttccggcccaagcgttggcgcatcacgccgatggtcgcgcacatcgaacaaaccggcctcgacgccgcccccatcgtggccttgctgacctttctggtcggtgccgtggtggcgtttcttggcgccacggtgttgaaaagctttggcgcgacgattttcaccgtcgatctggtggcgttttcctttctgcgcgaattcggcgtgctgctcaccgccattttgatcgccggccgtaccgccagcgcgtttaccgcacaaatcggctcgatgaaggccaacgaagaaatcgacgcgatccgcaccctgggcctcgacccgatggagttgctggtattgccacgcgtgctggcgttgctggtgtcgctgccgatgctgacgtttctggcgatgctctcaggcatcgtcggcggtggcgtggtctgcgccgtggcgctggatatttcaccggcgatgtttctctcgctgctgcaatcggacatcggcgtgcagcatttcctggtgggcatggtgaaagcgccaatcttcgccttcctgattgccgcgattggctgcctcgagggcttcaaggtcagcggcagcgccgagtcggtcggcgcccacaccacctccagtgtggtgcagtcaatttttgtagtgatcgtgctggatgcggtcgctgcgatgttctttatggagatgggctggtgagtcgtctacaccgagcgcccaccgaggcggtgatcgaagtgcgcggcctgtgcaaccgctttggcagccagagcgtgcacgagaacctcgacctggatttgtacaaaggcgagatcctcgccgtggtcggcggctccggcagcggcaagtcggtgttgctgcgcagcatcgtcggcctgcgccgcccgagtgaaggcgaagtgcgggtgttcggcaagaacctgcccaacctctcggaacatgaacgttcgctggttgagcggcgctttggcgtgttgtttcagaagggcgcgctgttttcctcgctgaccgtcaccgagaacgttgcgctgccgttgatcgaacatgccgggctcagccgccgcgatgccgaacacctggcggcggtcaagctggcactggccgggctgccgttgtcggcggcggataaatacccggcgtcgctgtccggcggcatgatcaagcgtgccgcgttggcgcgggccctggcgctggacccggacatcctgtttctcgacgaacccaccgccggcctcgacccgattggcgcggcgcaattcgaccagttgatcctgaccctgcgcgacgcgctgggtttgagcgtgttcctggtgacccatgacctcgacacgctgtacaccatcaccgaccgcgtggcggtgctggcgcagaagaaagtgctggtggccgatgccatcgatgttgtctcggaaacggacgacacgtggatccacgaatatttccacggcccccgtggccgcgcggcattggatgccgctcaatcgctagacgaggtatgacatggaaacccgagcccatcatgtgatgatcggtctgttcagcgtgatcgtggtggtcggcgcgatgctgttcggcctgtggctggccaagtccagcgtcgacagtgccttccaggactatgaagtggtgttcaacgaggccgtcagtggcctgtcccagggcagttcggtgcagtacagcgggatcaaggtgggcgatgtcaccagcctgcgcctggacccgaaagacccgcgccgcgtattggcgcgcattcgcctggccgggcagacgccgatcaaggaagacacccaggccaagctcgcgctgaccggcatcaccggcacctcaatcatccagctcagcggcggtacaccgcaaagcccggaactgcagggcaaggacggcaacctgccggaaatcatcgcctcgccatcgcccatcgcgcgcctgctcaataacagcaatgacctgatgaccagcatcaacctgctgctgcacaacgccaaccacatgttctcccgcgagaacgtcgagcggctgagcaacaccctggacaacctgcaacaaaccaccggcgccatcgccgaccagcgcggcgatatcaaagtggtgatgcagcaactgttgcaagtgagtaaacaggccggcgctgcgctggagcagaccaccaccctgatgcgcagcgccaacggtttgctcaacgatcagggcaagcaggcctttggcagcgccgagcaggcgatgaagtccctcgagcaaagcaccgcgaccatcaacaccttgctgacaaacaacaaggattcggtgaacagcggcatgcaaggcctcaacgaactggcgccggccgtgcgcgaactgcgcgaaaccctcggttcgctgcgcgccatctcccgccgcctcgaagccaaccccagcggttacttgctgggcagcgacaagaacaaggagttcacgccatgaagcgtgcttaccaattcatcgccccgatggccctggccctgatcagcgcctgctcgattttgcccaaggcagacccgttcgacgtataccgcttggcctcggcgcaaacgacaagccagggcgctccggtgagctggtcactgcgcgtgagcaagccgcagaccagcgaatttctcgacagcccgcgcattgcggtggtgcccaatggcgatctgatcagcagttacgccaactcacgctggagcgacccaacacccgtgttactgcgcaaccggttcatggacggtttccaacgcgatggcagggtgacgctgttgagtaccgacgagaccaacttgcaggccgattatgagctgggcgggcaattgcaggcgtttcagagcgagtaccgaggcagcacagtggaagtggtgatccgcctggacgcgcggctggtgcgcgggagtgatcagcggattattgccagccgacggtttgaagtgcgccagccggtgacggataccaaggtcccggcggtggtggcaggctttgggcaggcgggggatcagttgaacaagcaggtggtggagtgggtggtgcagcagggcaatacggcctctaaacactgaggccctcatcgcaggcaagccagctcccacattggaatgtgttcaccgttcaggtgtgggagctggcttgcctgcgataactatttcagcctcagccaaaaaaccagtagcacaccgcaatagccgccacgacaccggcaaactcggccagcaacgcacacccgaccgcatgcctggcccgctgaatccccaccgacccgaagtacaccgccaacacataaaaggtggtttcggtactgccctggatcgtcgccgccaccagcgccgggaagctgtccacgcccttggtctgcatggtctcgatcaacaacgcccgcgccgcgctaccggagaacggcttgaccatcgccgtgggcagcgcgtcaacaaagcgtgtgtccatgccggtccaggccacgaggtggcgaatcccctccaggccgaaatccaaagctcccgaggcacgcaacacacccacggcacacagcatcgccaccagatacggcagcaggttcttcgcaacgtcgaaaccctctttggcaccttcgacaaacgcctcgtacaccttcaccttgcgcagtgcgccgatcaccaaaaacagcatgatcaggccaaacagcgtcaggttgccgaggatcgaagacaagcccgccagtgccgtggccgacaaggtcgccagcaacgccatgaaaccaccgagaatcagcgccccggggatcaggtacgccagcaccaccgggtcccacaagcgcaagcgctgcatgatcgccaccgacagcagacccaccaaagtcgaggcgctggtggcgagcaggatcggcaggaacaccagcgtcgggtcggctgcgccttgctgggcgcggtacatgaagatggtcaccggcaacagcgtcagcgaagacgcgttgagcaccaggaacaggatctgcgcgttgctcgccgtattgggaatggggttgagttcttgcagcgccttcatggccttcaggccgatcggggtcgccgcgttgtcgaggcccaggccgttggcggcgaagttgagggtgatcaaaccgatggcggggtggccggcaggcacttccggcatcaagcgccggaacagcggaccgagggccttggccagccagtcgacgattccggctttttcggcgatacgcagaaagcccagccacaaggtcagggtgccgaacagcagcaccatcacttccaccgacaatttggccatggcgaaaatgctttcgaccatcgctgcgaaaatcccggcattaccgccgatcagccattgcgccagtgctgacaccattgccacgacaaagaagccaagccacaggccattgagcatcagttaaatcccccgaaagatggggcgaatgatagcggggctggcagaaacgacaaaccccggaattttccggggtttgtctttaagccgtcgtgctatcagccgcgagtggcttgggctgtcggcgcggcttctttgctgcgccagtgcggcagcgagttccagtagcgctcgcccttggcgtcgtcgtacatgccttcccagcgggagatgaccaatacagccagggcgttgccgatcacattgagggcggtacgcgccatgtccatcacacggtcgacaccggcgatgaacgccaggccttccagcggaatgcccacgctgcccagggtggccagcagcaccacgaacgacacgcccggcacgccggcgatgcctttggaggtgaccatcagggtcaacaccagcatcagttgctggccgaccgacaggtcgatgccgtacagctgggcaatgaagatcgccgcgatgctttggtacagggttgaaccgtcgaggttgaacgagtagccggtcggtaccacaaagctgcagatggccttcggcgcgccgtaggcttccatcttctcgatcacgcgcggcagcacggtttcagaactggcggtggagtaagccagcaccagctcatccttgaagatgcgcatcagcttgatgaccgagaagccaaacaggcgagcgatcaggcccagtaccacaaaggcgaagaacaggatggcgacgtaaaccaggatgaccagcttggccagcggcagcaaggaggcgaagccgaagttggcgacagtcacggcgatcagtgcgaatacgccgatcggggcgtacttcatgatcatgtgggtgactttgaacatgctctcggacacgccctggaacatcgtcaccagcggctcgcgcagttcaggcttgaggctcgacaagccaaggccgaacagcaccgagaagaagatgatcggcagcatgtcgccacgggccacggcggcgaagatgttcgacgggatcaggttgagaatggtctcgatgaacgcatgctcatgctgcacttcggcggcggtggcggtgtatttggagatgtcgacggtacccagggtactcatgtcgatgcccgcgccagggtggaacaggttggccagcagcaggccgaccacgatagcgatggtggtgacgatttcgaagtaaaggatggttttgacgccgatacgcccgagctttttcgcgtcaccgacaccggcaatgccgacgatcagcgaggaaatcacaatcgggatcacgatcatcttgatcaggcggataaagatatcgcccgctggctgcaacacattgctgatccaccaggccttttcagcactgaaatggttgagcactgcaccgattgcgatccccagcaccaaaccgatgaggatctgccaggcgaggcttagctttgccttcttcatgtcattacccttacttcaagtggacttaaggcaaatgcgccagctggaacgcccgaaagcgaaaaagtgtgtgcatctgcctccatggaaggtcaccgcagcatggccgaaatggcttactggcaggcgaaaaaaggcgcaactattcccatgcaagggagcgacgtctaatgccgtaaacgcctaccctatgccgaatcggcatgactttttttgaaattaactgtccgaacggtcagttcaattccgccaataaagcgggtgaatatgccgtggacctgccaataccggctcgctcagagatgttgaacgacctgatgcgattggcagaaatgcctgagaattcacaggattggcgtcagaaatgtcctatagcgcgagcgaaactttatcgatagatggtcacttggacacaccaagtaatggttggtcacaagcaaaaaagaaaatatcggctatggattgtatgagagagggctatgagtcacgagcccgccgcaagttcagcaagcttgaggacttgtgaacttgcgtcgcagcttttcacctgacccggcccttgcgcaggcactccctgtacccgtaggtcgcgccgatctcggttgatcagagcaacccggccccctggtcatgcatcgcccttggcgaacgatgcagacagaaagaagcgcagggcttctttctatggacgaaagcttcgtgggcgccgtgcgcgcccgacggaacctagtaccaattcgggtctttcttaagctgctccatcagcagcttctgcatgccttcattcggcttaccgaggaaccggtaatccgcgtgccgggtgggtgacttgtccgacggcaaaccggccgggacttgcaccaacatggcgtaggcatctttcttgtcgtagctgaaagcaacgatcaagcgcttgttcaggcaggtgtctgcggtttcgcaaagcgggccgaccaagtacttgtcgccatcatcttccacggcattcatttgttcagcggtgcccgacaggttcatcacccattccggcaggcgctcttctttcttcaccacgccttgccaggtctcgcgaaactgcgggtccgagccaagcaattcattggcccgggtctggccgtcattggcggccattaccaggccgctgccgcccagaagcagggcggcagcgatggctttgagggtcagggtggtcatattcagcctcggccgcgacgaccaaagaagaacgaagcgatgaacatcaccaggaagacgacaaacaggatcttggcgatccccgtggcggtgcccgcgataccaccgaagcccaggactgcagccacaatggcgatgatcagaaatgtgattgcccaactcaacatggtgattctccttagctcttatagaggtaacagcggtagtgccgtgcagccgctcaacacaagcgaccttttattgcctagaacacccaacgctcttgagcaggcagctcacccagggtcgaatcctggtcagccactctcaattgcggggcagttacattggccgcagttgcactgccaacggaacggaaatgggtttgtgtggtgacgggacgttcaaattgcggggtttgttgctgactctgctgccaatgttgcatctgctggccggcaatcaacgtgaccatcaacgccaggctggcgaacaggccctgctgcaagcgcagtggcgacacacgtagttggctgaggctttggcgagtcatgctgtattgctcccgcattctgattatttgttcgttgggagagatattgcagagtgcatgccagtttttttacaaaataaatctcaataaaatcagtaagttattaatgaatcaacgttacttcgcctagcatcctgcacgatggccctatcctggccgtgcgaaatgcacgatggtcagtggtcgggtcaagggatcgaaagcagatctcgtgttgccgaagtggcaagaaagcatgaaaacgccatcagctagcgtgtttgcaggaaggcgcgcagatagctgcgcgtagaagccttttatcaatcagaataaaccatgcaacttgcccgattattccgggactaatcaccatcattcatagttaaggagcgcgggacagatggaatcagccaaggaacttcaaggccgcattcttttagtggatgacgaatccgcgatcctccgcaccttccgttattgcctggaagatgaaggctacaccgtcgccactgccaacagcgccgcccaggccgatgccctgatgcagcgtcaagtcttcgacctgtgcttcctcgacttgcgcctgggtgaagacaatggcttggatgtgctggcccaaatgcgggtgcaggcgccgtggatgcgtgtggtgatcgtcaccgcgcactccgctgtggacaccgccgtcgacgcgatccaggccggcgcagccgattacctggtgaaaccctgcagcccggaccaattgcgcttggccaccgccaagcaactggaagtgcgccagctttcggcgcgcctggaagcccttgaaggcgaagtgcgccaacccaaggacggcctcgactcccacagcccggccatgatggtagtgctggaaacggcacggcaagtggcgggtaccgatgccaatattctgatcctcggcgagtcgggtacgggtaaaggtgaactggcccgcgccatccacggctggagcaagcgctcgaagaaatcctgcgtgaccattaactgcccatcgctgacggcggaattgatggaaagcgagctgtttggtcacagtcgcggcgcgtttaccggggcaagcgaaagcaccttgggccgagttaaccaggcggacggaggtactctgtttctcgacgagatcggcgactttcctctcaccttgcaacccaagttgctgcgttttatccaggacaaggagtatgagcgtgtcggcgacccggtcacacgccgcgccgacgtccgcattcttgcagccaccaacctgaacctggaagacatggtgcgcgacggccgcttccgtgaagacttgctgtaccgcctcaatgtcatcacgttgcacctgccgccgctgcgcgaacgcagcgaagacatcctgaccctggcggaccgcttcctggcacgcttcgtcaaggaatacgcccggcccgcgcgcggtttcagcgacgaggcgcgggaagcactgctcaactaccgttggccgggcaacatccgcgagctacgcaacgtggtcgagcgcgccagcattatttgcccgcaggagaaagtcgaaatcagccacctggggatggccgagcaaccgaccaacaacgccccgcgtatcggcgcggcgctgagcctggacgaactggagaaagcccacatcggcgcagtacttgccaccagcgataccctcgaccaggcggcccgcaccctgggcattgatgcctcgaccctgtaccgcaaacgcaaacagtacaacctgtgagctgtaccctatgaagcttgcgatgaaactgcgcactcggctgttcctgagtatctcagcgctgatcaccgttgccctgctggggttgatcctgggcctggtcagtgtgatgcagatggccaagacccaggaatcgctgattcgcagcaacttcgtcaccctggacctggggctcaagctgcgccagagcctgggtgaccagttaatcatgatgctggagaagcgccccgacccgcaggcgctgcaagcgtcgaaacaacgttatttcgacctgctggaccaaggcatcgcccacgaacaacgtgacggcaacggtcacggtttcagccaggctcacactgactaccagaacctgttggaagcgtttgacgaatcccagcaggcgtcgccgccgcccggcagcaaggaaaaactcaccgagaccttcaatgtattgcgcaacggcttgatcgccgagcacaagatggccttggaaaacatcagcaacagtgaacacaaatcccgcgaacgcgcgctgttgatcgctggcctgcttggccttgtggggcttgcggttctgatcatcggctttgtcacagcccacggcatcgcccggcgattcggcgggccgatcgaagcattggccaaagcggcggacaagatcggccaaggtgatttcgaagtcaccctgcctatctcatcagcggcagaaatgaaccagctgactcgccgcttcggcattatggccgaggcgttgcgccaacatcaggcaaccaatatcgatgagctgctggcaggtcaacagcgcctgcaagccgtgctcgacagtatcgacgacggcctgttgatgattgatcgccaaggccgcctggagcacctcaaccccgtggcgcagcgccaactcggttgggacgaagcacgcctgggccaagggttgggcgaggccctcgtacgcccggaactggatgagcagctgcatttggtgcttcgcggcggcaacctggaacgggccccggaagacctggaagtggaagttgacggcgaattgcgcctgttgacctatagcctgacccccgtcagccatacccaagggcatattctgggcgcggtgatggtgctgcatgacgtgaccgaacagcgcgcgtttgaacgtgtgcgcagcgagtttgtgttgcgtgcctcccacgaattgcgcacgccggtgaccggcatgcacatggcgtttggcttgttccgtgagcgcgcgaaatttcccgcagagtcccgtgaagcggacttgctggatacggtcaatgaagaaatgcagcgtctgatgcagttgatcaacgacttgcttaatttttcgcgctaccagaacggcctgcagaagctcacgctgggcccgtgtgatgtcaccgatctgctggaacacgcacgcgcccgttttgcagaactggccaacgcgcagcacatcgaactgctggtggaagcgcaatcggacttgccgcggctgtatgccgaccaggcccaactggagcgcgtgctcgacaacctgctggccaatgccctgcgccacaccgccgagggcgggcagattcgattgcaggcgcgccgccatggtgagcgggtgattatcagcgtcgaggataacggcgagggtattgcgtacggccagcagggtcggatctttgaaccctttgtgcaggtgggccgcaagaaaggcggcgccggcctgggtttggcactgtgcaaggaaatcgtgcaactgcacggcggccgcatgggtgtttattcgcgcccggggcaggggacgcagttctatatggcgctgcctctgtaatctgacaggttgcaaaataatgtgggagccggcttgcccgcgattgcggaggttcagccaagaatgtattggctgacactccggaatcgcgggcaagcccgcgcccacactggattgatttttatcttcaggtgcggttcaaggcgcgcaggattgcggcactttcagcatccggcgtgccatcgaacaacgatgggcggaaatgcatctggaaggcagcaatcacatggcgcgtggcgacatccagctcgccggtctgtggcgtctggtagcccagacgggccagttcttcctggaaccaaaggatgctcggtagctcggcggcgtactgcacctgaaaccgcgcgacagcttgagcatccggccaaacccccagaccttcagccgccaagcgtttccaagggaacaacggccccgggtcgagcttgcgcagcggcgctatatcgctgtggccgatgatgttcttggggtcgatgccgttgcgcttgctgatgtccttgagcagcacaatcagcgactgcacttgcggctcggagtaggggaaccacacacggcccttcggcgtgtcctgatagcccgggttcacaatttcgatgccgatggagctggagttgagccaagtgcggcccatccactcgctttcgcccgcgtgccaggcgcgctggctctcgtccaccagcttgtagatggtgcccgaggcgtcgtcgccgatcaggtaatggctgctgacctggccgtgggtcaataaggccagggagcgttcaaggttggtggaggtgtaatgcacgacgacgaattgcacgcggttgtcgtggtttaccgaagggtggctggtgttcaggcgcgggccactggcgcagccggcgagcagcagaaacaaaaaggcaaagtacaaggatttcatggcggatcacgttacgctgaagacgataatgcaacagtgtaacgtatggcttgcagcctgacggccaaatcacaaaatggaacatcttttacgccggcaatacctgattacgcccggccgccttggctcggtaaagtgcctcgtcggcgcgcttgagcgccaggtcactgcgctcgcccggctggaactgcgcgacccccatcgacacggtaatggtgaccggctcgcccttgaagtggaacgggcacgcctcaatcgccgcacgcagcacttcgcctacagccagcgcgtccgccagggatgagtcgggcatcagcaacacaaactcttccccaccgaagcgtgcgataaagtcagccgggcgcaggcgcttgcgcaacacattggcaatgatcttcaacaccttgtcgcccgccaagtgaccatagctgtcgttgatgcgcttgaaatggtccaggtccagcatggccagtgccaggctattgccacgctggtgccaggtgttgacctcatggtccaggcgttcactccaggctgcgcggttgggcaagccggtgagcgggtcaatcaaggccttctggcgctggacttcaagatgttcacgatagccttgggcttcctgctccatgttcgcaacacgctcggccaagcctttgaggcgcgccgcaacctcttgctcgcgctggtcacgctgctgctggtgttcgtccatggtgccgagcaagccttcaaggtggctttccagaacgtgcttgaggctgtccaggtcggccgcttcctgcacactgctttgcaggccgtcgacctgctcacgaatttgcgtgtccagctcgcgcgccgccgaacgactgtcggcgtggccatcactggcgacttgcagatggccctggaatgtcaccaggcgctcgttgagctgcttgagataagcctcgaattcatgctggccgctgtcggtgatcgccaacatcagcacggcgagatcatcgaggatcggcaacaactcataccagttcaagccgtgggccagccgctcgcgcatggcttctgcctggggccggtagcgctcgggcaaagacaagtcttccaacaagccgagcaaggtatcttcgatatgtttggcgaccgagctgtaggacggctcgggcgagtcgggcagggcgtagataccctccggctgaagcacatcggggtccgcctcgacgacctccagcacgggcggaagggacaggctgccgatggtggtttcatccggcgcgtcgacctgaacctgcggcgtctcgataaaagccgccagggcactttcgggcgccaactcttgcggttcaggctcaggcttttcgggttcgagggcatcgacaggctgcgccgaggccgctacgggggcaggcgcctcaaagacaaatgtttcgctggccacctccaccccattggcgggtgccacgggctcaggctgcgcggcggccgggggctgttgcaacggcgcgaacgcgcgcagggcctgtgtcaactcctcggattgcgcgggcacttgaagctcgggtttgggtgctacggtcttggccgcaggcggtggtacgacttcgaccacctgcgcttcactcgaaacctccttgctgccaaacaggcgctgcagcagccccgggcgcgcggtttcgccctcaggctccaggttattcagtgcctgcccttgcaggctgctcagctcactgagtaatagcggaatctcacgtgcctggctgacgcggccgtccaactgcttggcgaaggttttcagcgggcgcgccacctcgcggggcaggggcagtttttgcagttgcgcgacgagcgatgtcagcgcgctactgatctgatcaacccgggtttcgcggcgttgctcggagtcgagcacggccttttccaggcgcggcaacaaggcggcgagggcggcgtccatgtcatcggtgcgcaccacatcgcgcatctccttcatgcattggtcgaccgcgcggtcggtcccttcggcggccagcgtgctgcgtacaagccctcggcgcagcaagtcgaggcgcgcagcccagcggcgctcaagtttgtcctggcgctcgatgcttttgaggtatttctctttccagcgctgggcgtcgtcgctcatgcaaggggtccgcgagggcctgggctcaacgcggggtatgcatcagccgtgagcgaacccggcagacgaatctctaccgcgaccggcaggtgatcggagatgggctgcgccaggacctgaacgctttcaagcgtgagggtcgggctgagcagaatatggtccagacagcgctgcgggcgccagctgggaaacgtggcttcgacttgcggcgccagtaacccgaggtcccgcagcggggaattttgcaacaggtcgctggcatgggtgttcatgtcacccatcagcacctggtgtttgtaattgccgatcagctcacggatgtaagccagttgcatcatgcgcgtacgtgaaccaagcgacaggtgcatcatgaccacgaccaaggcttcaggaccttcgccaaagcgcacaaggatcgcgccccggcccttggggcccggcaatgggtgatcttcgatagcccaaggcttcaagcggctgagcacaccattgctgtgctggcccaagcgcccaaggttgcgattgagttgctgataccagtaaggaaaagcgcccagctgggccaggtgttccacctggttgatgtagccagagcgtatgctgccgccgtcggcttcctgcagggcgaccaaatcgaagtcgttcagcaggttgccaatcttttgcaggttcacggcacgcccgttgtggggcagcagatgctgccagccacgggtgaggtagtgccggtacttctcggtactgatgcccacctggatattgaaactgagcaggcgcaggcggctgtctgccggcaggcctgtggattccaggtgatgttcgttgacctgcgggtcatgcaggccgacgacgcgttcagtcccccagcggcgcatgatggcccccttacttggctgcgcgctctttggcgatcagctggtcggcaacgttcagggtcgcttcaggaccaccggtggtgcccaggtcaaaacggtatttgccgttgacgatcatggtcggtacgccttgcacgccatacttctgcgcgagttccttggcctgtttgatctgaccctggatagcgaaggagttgaaggtggccaggaatttgtctttgtcgacgccctgggtggcgacaaagtcagccatttcgtcaggcttggtcaggcgcttgccttgtttctggatcgcgtcgaatacggcgttgtggaccttatgctcgacacccatggcttccagggtcaggaacagttggccatgggcatcccatgggccgccgaacatggcgggaatacgtttgaagttcacgtcggaaggcagtttttcaacccaagggttgatagtcggttcaaacgcgtagcaatgcgggcagccgtaccagaacagctccaccacttcgatcttgccaggcaccgagaccggtaccgggttggccaattcaacgtaggttttaccggcttcaagcggcacgtcggcagcttgtgcggtcatgccgaagaggctggcagtgacgagagcggcgctgaggatcagattacgcatgctttactcctggacaaataaagtcgcctcacgcgacctttgttgtgacaggtctacgcgggcatgagttcgttagtgtaacggcaccggccacaaaaaagggcggccaaagccaccctttttatgcttgcatcgacggattaatcgagcgttaacgtcgtatttgtatcagtgcagaccctggatgtactgggaaaccgcctcaatgtccttgttgctcattttattggagatggtttgcatgattttggcatcgccgtcgttagtgcgattgccttcacggaagtccgtcagctgcttggcaatgtactgcgcatgctggccgctcaagtgcgggaagcctgcagcggcaaggcctgcgccgttaggcgagtggcaaccgaggcaggaaggcatgcctttttccaggttgccgccacggaacaactcttcgccgtgagcgaccgttttaggatcggcagctcccacactgccgtgctggctggcaaaatacgccgcgatgtctgccaggtcctgatcgctgaggttagtcagcaggccggtcatttccagcaccgtgcgcttgccgtccttgatgtcgtgcatctgtttgatcaggtagcgttcgccctgacccgccagtttgggaaagtttggcgccgggctgttgccgtccggtccatggcaagcaccacacacggcggctttcgcctggccggctgtagcgtcgcctgcagcatgggcaacaccggtgatgcccaaggtcaacagcagactcacgatcagtttgttcatcagctaatccaactacggctaaggggtttaagagttatctaccgggtttactcaccatcatttcaatgatggcctggtaatcctcagtactgcagtccatgcacaaaccacgcggcggcattgccttgaaaccctgggtcacgtgttgcaccaacgtgtccatgcccttggccagtcttggctgccaggctgcctgatcaccccgtttgggggcgttgggcagctggccggcatggcaagccacgcaaactcggttgtacaccgcttccggatcctgtgtagcctgagcgccataaagcggaatcaggacaccaaaagcgagcaaccagcgggtcatacatcgaccttttcagggtttgagagcgttttgcgttctaatgcgcaatgtaggtctttcgctcccgtgaacttcatccttcgctgggacaaagcacacacaaaatctgcggcattatatactggcgctactgaaacggaaacgacaccgcttgccgcaccctttctcggcaccgcccacatcggaaatctcatgcaactcaagaatcccatcctcggtctgtgccaacagtccacgttcatgctcagcgccgccaaagttgaccaatgccccgatgacgaaggctttgaagtcgcctttgccggtcgttccaacgccggtaaatccagcgcgctgaacaccctgactcacgccagcctggcacgcacctcgaaaaccccgggccgcacgcaacttctcaatttcttcaagctagacgatgatcggcgtctggtcgacctgccgggctacggttacgcaaaagtacctatcccgttgaagctgcactggcagcgtcacctggaggcttacctgggtggccgcgagagtttgaagggcctgattctgatgatggacatccgccatccgatgaccgacttcgacctgttgatgctcgactgggccgtcgccagcggcatgccgatgcacatcttgctgaccaaagccgacaagctcacttacggcgccgccaagaacaccttgctcaaagtgcagtctgaaattcgtaaaggttggggtgatgcgatcaccatccagctgttctcggcaccaaaacgcatgggcctggaagaggcctacacggtcttggctggctggatggaattggcggacaagggcgcggaaatcgccgaataacttttcggcgggcaaaaaaaaccccggacttcgtatggggaggggaagttcggggttcaagttctggaccgctagggcggggtccagatatctgccaacacttaacacaacataggagcattgaagggcttcaccacccattcagtaactctgagtagcagttcacgggttaagttccggcacgctcaaaaaactattggaaataactgacggcggtatccgatctaaagcactctgccaccacgttaggtgatggcaacccccctgaatcagtgtgcttcgtcccagttatcgcccacacccacgtcgaccaccaatggcacgtccaactgcgccgcagcactcatgtgctcgcgaatcttctcgctgacttcagccaccaggtcctcacgcacctcaaccaccaattcatcgtgcacctgcaggatcactttggcatccaggcctgactcggtcagccagttgtcgacgcgcaccatggccttcttgatgatgtctgccgccgtgccctgcatcggcgcgttgatcgccgtgcgctctgcagctgcgcggtcctgaggcttgttggagttgatgtccggcacatacaggcgccgaccgaagatggtttcgacaaaaccctgatccgcggcctgcgcgcgggtgcgctccatatactcgcgaaccccgggatagcgggcgaagtacacgtcgatatacgccttggcggtcttggtatcgacgccaatatccttgccgagcttctgcgcccccatgccgtagatcaggccgaagttgatcgccttggcgctgcgacgctgattggacgtgacctcggtcagctcaaccttgaacacttcggccgccgtggccgtgtgcacgtccaggtcgttgcgaaaggcattcatcaacccttcgtccttggacaggtgcgccatgatccgcagctcgatctgcgaatagtccgccgccagcagcttgtaaccttttggcgcgacaaacgcctgacggatccgccgcccttcagcggtacgcacagggatgttctgcaggttcgggtcactggaagacaagcgcccggtcgccgccaccgcctgatgataagacgtatgaatacgccctgtacgcgggttgatctgctccggcaggcggtcggtgtaggtacttttcagcttgctcatgctgcggtattccatcagcacttttggcagcaaaaagtcatcttcagccagtttggccagcacttcttccgcggtagacgcctggcccttgcccgtcttcttcaacaccggaagcccgagtttttcgtaaagaatggcaccgagctgcttgggcgagccgaggttgaattcctcgccggcgatctcgaacgcctggcgctccagctcgaccatcttgtcgcccagctcgatgctctgcacgcccagcaacttcgagtccaccagcgcgccctggcgttcaatccgcgccagcactggaaccagcgggatttcgatgtcggtcagcacactggccagggtgggaatcgccgccaattgcgcatgcaatgcctgatgcaggcgcagggtgatgtcggcatcctcggcggcgtaaggcccggcctgctccagcgcaatctggtcgaaggtcagttgcttggcgcctttgccggcgatgtcctggaaactgacggtgtcgtagtccaggtacttcttggccaggctgtccatgtcgtgccgggtcgcggtggagttcagcacataggattcaagcatggtatcgaacgcgatgccgcgcacggtgatgccttgggccgggtcaccaccgatggcgcagtttgccaggatgttcatgtcgaacttggcgtgctggccgaccttgagtttggccgggtcttccagcagcggtttcagcgcgagcagcaccgtatcgcggtccagttgctcaggcgcgccgatgtaggagtgggtcagcggaatgtaggccgcttcatgaggctgcacggcgaaggaaaccccaaccaactgtgcctgctgggcgtcgatgccggtggtttcggtatcaaacgcaaacaatttggcgttattgagtttcttcagccagagctcgaacgtcgcttgatcaaggatcgtggtatagctcgcctcgacaggcgccgccgccacttcctcaacaaccgcctcggcggcaggagccgcgctgagttccacgcgcttggcatcgcgctgaatctcgtcgacccagctcttgaactccagcaactggtacaactccagcagcttttcacggtccggctcaatcaggtgcaggtcatccaggcccacatccagcggcacgtcgcatttgatcgtcgccagctggtaggacaaaaacgccgattccttgtgctcttccagcttggccggcagcgtcttggcgccacggattggcagggtcggcactatgtccaactgctcatacagctctttgatcccgccattcacgcccatcagcaggccggaagcggttttgggaccaatacccggaacgcctgggatgttgtcggacgaatcgcccatcaacgccagataatcgatgatctgttcgggagcgacgccgaatttctccttaacgccctcgatgtccatcgaactaccggtcatggtgttgaccaaggtaatgtgcccgtccaccagttgcgccatgtctttatcgccggtggaaatcactaccgggcggctggccgctgcgctgctgcgggccagggtgccgatcacgtcatcggcctccacgcctgtcacgcacagcagcgggaagcccaaggcaatcacgctctggtgcaagggctcgatctgcaggcgcatgtcatcgggcatgctcgggcggttggccttgtactcggcgtacatgtcatcgcgaaaagtcccacccttggcgtcgaaaacgacggcaaacgggctgtcgggatactgcttgcgcaggctcttgagcatgttcaacacgcccttgaccgcaccggtcggcaggcctttggaggtggtcagcggtggcaacgcgtggaacgcgcggtacagataggacgaaccgtccaccaggacgaggggtgcttggctcatgagcagaatcaaccttttcggcgggccaggcgctagaatagccggaccaatgacgacaaagggacaaggttatcatgcgtacagcgaatcgcttgttgttgaccggcttgattgcattcttgccgctggccgccacggcagccgacagcgcgccctcgggtgacccggacgtcacgatccgtaccgaaggcgacaaggaaatcagggagtaccgccaaaacggcttcctgtacgcaatcagggtaacgccaaagggcgcacccccgtattttctggtgcgcgccgacggaaccgacgcaaacttcatccgctctgaccagccggatatgctgatcccgtcatggaagatcttcgaatggaaatgatttcttaacttaaattggcgccgcacgctgcggcgcccgtactggcagttttaaccatgtctgtgttcacccccctggctcggcccgagctggaaacctttctcgccccttatgggctcggccgcctgcttgatttccaggggattgccgccggtagcgaaaacaccaacttctttatcagcctggaacagggcgagttcgtcctgactctggttgagcgcggcccggtcgccgaaatgccgtttttcatcgaactgcttgacgtgctccacgacgccgacctgcccgtgccttatgccctgcgcaccaccgacggcgtggccctgcgcgaattgaaaggcaaaccggcactgctgcaaccgcgcctggctggcaagcacatcaaagacgccaacgcacaacactgcgcccaggtcggcgacctgctcggccatctgcacctggcaacccagggcgagaaagtgctggagcgcaagaccgatcgcgggctggactggatgctcagtgaaggcgcacagctgatttcgcacttgaacgacgcacagcaacgcctgctgcaagacgcactgaccgagatcgacgcccacaaggctcagatcctcgccctgccgcgcgccaacgtgcacgccgacctcttccgcgacaacgcgatgttcgaaggcacgcacctcacaggcctgatcgacttctacaacgcctgctccggcccgatgctgtacgacgtggccatcgccctgaatgactggtgctcggacgccgatggcgtgcttgacgggcagcgcgcccgcgcgctgttgggtgcttatgcagggctgcggccgttcaccgctaaggaagccgagctgtggccgaccctgttgcgcgtggcgtgtgtgcggttctggctgtcacgcctgatcgcggcggagtcgtttgcggggcaggacgtgttgattcatgacccggcggagtttgagcaccggttggcgcagcgtcagcaggtcacgattcacctgccgttcgcgctctaaaagagctactcggtaaaaaatgtgggagctggcttgcctgcgatagcgatgtcgattgacacacagctatcgcaggcaagccagctcccacaggtattacagcgactccaggcacccggccaagtcattccccagcttctcaagcacctgctcataaccctgagccgtcgccggtgtgtacccccccagcgcatccagctccgccagcttcaccggcaaccccgccaccagcgtctcggccaaacgcggacgcaacggcggctcgctgaacacacaggtcttgccgacttcctgcaaccgcgtgcgcatcgccgccacatgctgggcaccgggctgcacttcggcggccacactgaacacgccggtgtgcttgaggccgtaggcatcttcgaagtaatcaaatgcctcgtggaacacgaagtaaggcttgtcgcccaccgccgccaagcgcgctttcaaacgcgcatccagcgcatccagccgctcatcaaacgccttcacattgctctggtagcgcgccgcattggtcgggtcggcagcgctgagatccgccgccatgcgcgccgcaatcacccgtgcattgaccgtcgacaaccacaaatgggcatccaggctgcccggacggtggtcgtggtcatgctcgtcggcatcatcggcatgagagtggctatcttcggcgaaacgacgaagcttcatgcccggcaagtcctgcacggcgaccgtcggcaggctgcggcctttcaacacgcgcggcagaaagctttccatgtccgggccgatccaatacaacaggtctaccgactgcacgcgccgtacgtcggatggtcgcaaggcgtagttatgcggcgacgcgcccggcggtaacaacacctctggaatcgccacaccgtcctgcacagcggcggcaatcagctgcaacggtttgatgctggtcagcaccttgacctcggcctgagccgcgcccgcaatgaacaaactggtgacaaatacgacaaaaacgggaaaaagtcgggacacgatgaccactcaatggcgtaggaacgggtaacataataacgtctctatcaaatgtctgtcgccgctcatgcctaaaacaccgcttgccagccgtccccacgaccactctcactgcgtgcacaccgcgctgtcggaagccgaagcgctgtgcctgcgccaaggcctgcggctgactgccctgcgtcggcgcgtgctggaactggtgtggcagagccataagccactgggcgcctacgacattctcggcgtgctcagcgagcaagacggccgccgcgccgcgccgccgaccgtgtaccgtgcgctggatttcctgctggaaaacggcctggtgcaccgtatcgcctcactgaacgccttcgtcggctgcagccacccggaacacgcgcaccagggccagttcctgatttgccgcgagtgccacgccgccatcgaacttgaacaaaaaagcatcagcgacgccattatcaaaagctcgaccgacgtcggcttcaaggttgaagggcaaacggtcgaagtcgtcggcctgtgctcgggctgccagggggcttgatgagcaatgcgctaatccgcctggagcaggtcggggtcacgttcgccgggcaaaacgtgctggataacatcgcgctgagcgtggagccggggcagatcgtcacgttgatcggccctaacggcgccggcaagacaaccttggttcgcgccgtgctcggcctgctcaagcccgacagcggcaccgtatggcgcaagcccaaactacgcgtcggttacatgccgcaaaagctgcatgtcgacccaacgctgcccctgtctgtgctgcgctttctgcgcctggtgcccggcgtagaccgcgcccgcgcccaggctgcgctcaaggaagtcggtgccgaacaggtaatcgacagcccggtgcagagcatctccggcggcgagatgcagcgcgtactgctcgcccgcgccctgctgcgcgagcctgaactgctggtgttagatgaacccgttcagggcgtcgacgtcgccggccaggccgagctgtacagcctgatcacccgcctgcgcgaccgccatggctgcggcgtgctgatggtctcccacgacctgcatctggtcatgagcaccaccgaccaggtggtgtgcctcaaccgccacgtgtgctgctccggccacccggaacaggtcagcggcgacccggcgttcgtcgagctgttcggcaagaacgcgcaaagcctggcgatctaccatcaccatcacgatcacgcccacgatttgcacggcgccgtggtcgacgaccctgcaacacctcacgctcacgttcatggagatagctgcaagcatggctgattttctgctctacgccctgctggcaggcttggctttggcgttggtggcgggccccttgggctcgtttgtggtgtggcggcgcatggcctatttcggcgacaccttgtcgcacgccgcgctgctgggcgtggccatgggctttttgctggacgtaagcccaaccatcgccgtgactgtcggctgcctgttgctggcagtgctgctggtgaccctgcaacagcgccagccgctggcctcggacacgttgttgggcatcctggcgccgagtacattgtcgctgggcctcgtcgtactgagcttcatgcacgaagtgcgcatcgacctgatggcctacctgttcggcgacctgctggcgatcagcccgaccgacctggcgtggatccttggcggcagcgcagccgtgctggtgctgctcgtaaccctgtggcgccccttgctggcgatcaccgtgcacgaggaactcgccaccgtagaaggcctgcccgtgccggcgctgcgcatgaccttgatgctgttgatcgcggtggtgattgctgtcgcgatgaagattgtcggcgtattgttgatcacgtcgctgctgatcattcccgccgccgccgcccagcgccacgcccgctcaccggagcagatggccataggcgccagcctgctggggatgctcgccgtgtgcgggggcttggctctgtcctggttcaaggacacgccagcggggccatcgattgtggttacggcggccgccctgtttctgctgagttttgttctgccccgtcgaggggtgtagacttgctcgctttttgcgcaattagagagtcgcaggaatgaagctgttcacctcccgttatctgctccttgccgcattttcactgctgctgggcgcctgtcaaagcacaccgcccgccgcccccgaggtgccggacgctcgcgctgcggccatcgcgcagctggagcaaaacctggccagcagtgagctggccaccgccgaagacgaattggccgcgctgcaggcgcaatcgcctaacgaccccgcgctggaaacctatcagcgccaattggccgaagcctacctgcagcgcagccagatcgtgctgcaaaaaggtgacgtcaacgccgccgccactgccctgagccgcgcccgcgcgctgatgcccaaggcgccagcgctgaccggcggtgtgaacagcgccatcagccacgcccgcaaagccgaactggaccaggccgaagctgccttgaaagccgccgaagccaagccggtggccaaggtcattgacccggccgctgaaagcaccaccgtggcgctgaacctcaccgatattgaagaacttcgccaccaactggatgcgatcgccaccgatgtggtgaattaccagtgcgacgtgagtatccaggcgccgcgcaccgaggattacccgtggctggccaccttgctgaccaaacgggttaaacggattgattcggggtatgacctgaagattcaccggcagatcttgaagaggattccggcgcaggttgtgctgattccgcgcaaggcctgataaagcaaaaagcatcgcaggcaagccagctcccacatttgaacggtgaatacattcaaatgtgggagctggcttgcctgagatagcgatccaacaaacaaccactaactcaagccggaatcgccttggccttagcctcccgatcccaaacccgatgctgcccgatcgcagcaaagaatgccttgaacgccttggcatccgcccccacgatcaagcccgcatccgcctccagcttcaacagctccatcaacggcttcacatcactggccaccgcaatcgccttcaggtgcttgtaagcctccagcacgtaatgcaacgccacgccgtcgccgctcagggccttcaccgactctttgccacccggaatgaacaccgcgtcgaacgccaccgacggcaaaccttccatcgacgcatccactgacaggctcttgccatcggccgtggtcaccggcgcagaagtcggccccagcaatttagcgtgcgcaccttctgcttcaagcgctttcttcaacgccgcaatggctgcgccgtccacgccattcgccgcgaggatcgccaccttgcgtgtcttgatattgcccgggagcaagttcgcctggctcaacgccggcgagcgggccaatgacgtctcgcgctctggcaccgtgcctttcttcggcactggcaacccaaggttctgcgccacgcgcttggccagctcaaggtcaatgttggccagaatctcgttgacctgacgcgcacgaataaactcacgctccaccttgcccaactcaaaactgtacgccgcgatgatgtgctcttgctcgtgcttgctcatgctgcggaaaaacaggcgcgcctgggaaaagtggtcgccgaacgactcactgcgctcgcgcactttgtgagcatcgatgcgctcgtgataggactcaaaaccaccatcctgcgccgcaggcggcgtttctttgggccagccgccatcaatggagttgggctcgtaggccgcgcgccccttgtcgatggtggtgcggtgcatcgcgtcgcgctggccgttgtgaaacggcgcgaccggccggttgatcggcaactcgtgaaaattcggcccccccagtcggctgatctgcgtatcggtgtaggaaaacagccgaccttgcagcaacgggtcattggagaagtcgatacccggcacgatatggccggggcagaaggctacctgctcgacctcagcgaagaagttgtccgggttgcggttaagcaccattttgcccagcggcgtgatcggtaccagctcttcagggatcagcttggtggggtcgaggatgtcgaagtcgaaggcatgctccttgtcctctggaatcacctgcacacccagttcccactccgggtagtcgcccatctcgatggcgtcccacagatcgcgacgatggaaatcggtgtctttacccgcaagtttctgcgcctcgtcccacaccagcgagcaggtacccgcagtagggcgccagtggaatttgacgaagttggatttaccttcagcgtttatcaggcggaaggtgtgcacgccaaaaccctgcatgctgcgtaggctttttggtatggcacggtcagacatggcccaaataaccatgtgcgctgattcaggctgcagcgagacaaaatcccagaacgtgtcgtgcgccgagccgcccgtaggaatttcgttgtgcggctcgggctttaccgcgtgcacaaagtcaggaaacttgatcgcgtcctgaatgaaaaagaccggcatgttgttgccgaccaggtcgaagttgccttcttcagtgaagaacttcacggcaaaaccgcgcacgtcacgcaccgtgtcgcccgagccacgcgggccctgcacagtggaaaagcgcgtgaacaccggggttttatgccccgggtcgcgcaagaaacccgccttggtcagcgcagaatggttttcatacgtctggaagtaaccatgggcgccggtgccacgggcatgcacgatgcgctccgggatgcgctcatggtcaaagtgcgtgattttctcacgcatgatgaagtcttcgagcagcgacgggccacgggcgccgactttcaagctgttctggttgtcggaaatcttcacgccctggttggtgcgcagggcttggccggtagcgtcggaacggaactcttccagggcctgcaacttggcgttggtgttcttgcgatccagggtgtcggttccggcgagttcgctctttggctttttcgtactcatcagtcaaaactccttattcaggcccaggcacggcacccgggaaattgagttgcttaagtagtgactgatggggttttgggccgttccttttttatgacctttgatcgcgttattgccaaatcgctggatgaatgcgaaataaatgctaagaaacgctatacggacaggctaaaatgcgcgcccggctaaccgctgatcccttttccatgcgccccacaaggttcgctacgtgatcgagtttcaaaacgtccataaaacctaccgcgtcgccggtagggatatccccgcgctgcaccccaccagcctgcgcgtcgagaacggccaggtgtttggtctgatcggccattcgggtgcgggtaaaagcaccctgctgcgcctgatcaaccgcctcgaagaaccgagcggcggccagatcacggtggacggcgaagaagtcaccgcgctggacgccaacggcctgcgccgtttccgccagcaagtcgggatgatcttccagcacttcaacctgctggcgtccaagaccgtcgccgacaacgtggcactgccgctgaccctggccggcgagttgtcgcgcaaggaaattgatctgcgcgtggctgaattgctcgcccgtgtcggcctgtcggaccacgccaagaaatacccggcgcagctgtcgggcggccagaagcaacgcgtcggtatcgcccgcgccctggcgaccaagccaaaaatcctgctgtgcgacgaagccaccagcgccctcgacccgcagaccaccgcctcggtgctgaaattgctggccgagattaaccgcgagctgaagctgaccatcgtgctgatcacccacgaaatggacgtgatccgccgcgtatgcgaccaagtggccgtgatggacgccggcgtgatcgtcgagcaaggctcggtggccgacgtgttcctgcacccgcagcacccgactaccaagcgtttcgtccaagaagccgagcaagtggatgaaggtgagcaacgcgatgtattcgcccatgtgccgggccgtatcgtgcgcctgacgttccagggcgaagcgacctatgcgccattgctgggtaccgtcgcccgtgaaacgggggtggactacagcatcctcgccggtcgcatcgaccacatcaaagatacgccctacggccaactgaccctcgccgtgaccggtggggacatggaggccgccttcgcccgctttactgcggcagacgtccacatggaggttctgcgctaatggatgttttgttgagtttcttcgccaatatcgactggtcggaaatctggcttgccactggcgacaccatgaccatgctgttcggctcgctgttcttcaccgtggtgctcggcctgccgctgggcgtgctgttgttcctgaccagcccgcgccaactgttcgaacaaaagggcctgtacgccctactgtcgctgatcgtgaacatcctgcgttcgctaccgttcatcattctgttgatcgtgatgattccgttcaccgtattgctcaccggcacttcgctgggcgtggccggtgcgattccgccactggtcgtgggcgccacgccattctttgcgcggctggtggaaaccgccttgcgtgaagtcgaccgcggcatcatcgaagccactcagtcgatgggcgccagcacgcgtcagatcatcgtcaacgccctgttgcccgaagcccgccccggcattttcgcggcgattacggtgacggcgattacactggtttcctacacagccatggccggtgtcgtcggtgccggtggcctgggtgacctggcgatccgtttcggttaccagcgcttccagaccgatgtgatggtggtcacggtggtgatgctgttgatcctggtgcaaattctgcaaaccgtcggcgacaagctggtggtgcatttttctcgaaaataacggccatggccggcccccccgccggccccgcccgaacaaggagcttgttggatgaaaaaactactggttgctttcgccgccgttgccgcgttttccgcccacgccgagaccatcacggtcgccgcatcgccggtgccgcacgcggaaatcctcgaattcgtgaagcctgcgctggctaaagaaggcgtggatttgcaggtcaaagtcttcaccgactacgtgcagccgaacgtacaggtagctgaaaagcgcctggacgccaacttcttccagcaccagccgtacctggatgagttcaacaaggccaagggcactcacctggtgagcgtcggcgcggtgcacctggagcccctgggcgcctactccagcaagtacaagaagctcgacgagctgccaagcggtgccaacgtcgtgatcccgaacgacgccaccaacggcggccgcgcgctgttgctgctggccaagaatggcctgattaccctgaaggacccgaccaacatcctgtcgaccatcaaggacatcaccggcaacccgaaaaacctgaaattccgcgaactggaagccgccacgctgccacgcgtgctgactcaggttgacctggcgctgatcaacaccaactacgcgctggaagccaaactggacccgtccaaggacgccctggtcatcgaaggcagcgactcgccttacgtgaacatcctggtcacccgcgaagacaacaaagactcggacgccgtgaagaagctggttgctgccctgcacacgcctgaggtgaaaaaattcatcgaagagaagtacaaaggcgcgatcaagccggcgttctaacccgattcgatctcccacacaccggggatcaaaaatgtgggagcgggcttgcccgcgatagcgaagtgtcagtcactgaagatgttgactggaccaccgctatcgcaggcaagccagctcccacattggttttgtgttggtcgttatttacgctgcaacagcaccggcaactgcaccaccagcttctggttattcagcggcgcacgaataaacccgcgctgcgtgccgtccgggccgatcaccgccaggttgccgctgtggtccacggtgtagttcggcttgctggtatcggctggaatgaacgggatgctcaccgcattcgacactttctgcacatcatccacattcgcgccggtcaggccttcaaactgtgggtcgaagtagcccaggtactgcttgagctgggccggtgtgtcgcggttcgggtcgacgctgaccaggatcacctgcaggttatccacagcctctttgggcagttcgctcttgatctggcgcagctgggcgagggtggtcgggcaaatgtccgggcagaaggtgtagccgaagaacagcaggctccacttgcccttcagctcgttgaccaccaccggctggccgtcttgattggtcatggtcacgggcggcaactggcggctttgcggcagcaggatgataccggcgtcgatcagcgcggtggggtcgccctggcctttgcccgagagcactttgttgacagtcaggcccatgatcaacgcgacgatggccaccaggataaagacggttttttgagttcgagtcataggttcaacagtaagtagtggtctacgagcagggcgataaacagcagaaacaggtaccagatagagtacttgaacgtattgatcgccgcgtgcggctgggtgccacggtacagcacacaggcccattgcagaaagcgtgcgcccaatacgagcgcgcaggcgaggtagagcagaccgctcatgtggataacgtacggcatcaggctcaccgccagcagggcgaaggtgtagagcaggatgtgcaccttggtgtagtgctcgccgtgggtgaccggcagcatcggaatgtcggccttggcgtattcttccttgcgatgaatggccagggcccagaagtgcggcggggtccaggcgaagatgatcagcaccagcagcagcggctccgcgctgacatggccggtcacggcaacccaaccgagcagcggcggcgcggcaccggcgaggccaccgatgacgatgttctgcggcgtcgcgcgcttgagaaaaccggtgtagatcaccgcatagccgagcagagaggccaacgtcagccaggccgccaacggattggtaaacgccagcagcaacgccaaaccggcaacagccagaaacaatgcaaacgccagcgcagcaaccggcgatacgcgcccttctgccatcggccgcttatgggttcgcgccatcaccgcatcgatacgccggtccaccacatggttgaccgccgccgcgccgccggcacacagggcaatgcccaaattgccaaacaccagcaccgtccacggcaccccggcgcgggtggcgaggaacatgcccaccaacgaggtgatgagcatcagcaccaccactttcggcttggtcagctccaggtagtcacgccagatcgcctggcggtgacgcgcgccgatcaaggtcgccatggcatctctcctttaagggtgatgaggcccgacacgtgtttgcgcgggataaagcgccagccgaagcgcgactgattgcgcacccgaaccaggctggtgcgcgcgtggtaattaaccagcaccaggctcagcaacaacgcggcgccgcctgcgttatgcgccaccgcgacaggcagaggcagatggaaatacacgttgctcaggcccaggcagatttgcgcggccagggcgatcaacagcaggcccgccagacgcgtcatgccgaccaacttgagctgccacgccagccccagcagcacgagcgtgacaatcactgcaccgatgcgatgggtaagatgaatcgccgtgcgtgcatcgctgtcgagctggccgccgaggtaattcgggccgatgtgctgagtcaggtgaaaaccgttggcaaagtccgccgccggccaccattcaccgtggcaggtcggcaagtcgatacacgccaccgccgcgtagttggaactgacccagccgcccagcgcaatctgcccgatcaccaacaccaacccggccgtggcccaatattgcaggcgcttgggcacgatcagcgcgggcagcacgccggacaggcgcagcgtcagcagaaacaacaggctaaacgtcgcaaaaccgcccaatagatggctcgtcaccacttgcggccagagcttcagcgtcaccgtccacatgccgaaggccgcctgggcgaagaccaccgccaggataaacagcggcaatttcaccggctggcccggatcgcgccgatggctccacgaacgtgccgccagcagcacgatcagcaagcccaaagtgccggcgaaatagcgatgcgtcatctcggcccagcccttgtcggcctccaccggtgtgtccgggaaatgcaactcggcatgcgccaactgggcttcgctttgcggcacgctgataaagccgtagcaccccggccagtccgggcagccgaggcctgcgtgggtcaggcgcgtgtaggcgccgagcagcacgacgatcagcgccagcaaggtggcaaacaacgcgaggcgaaatccaggtttggccatgacgatgcccttatccgatgttcgacagtttcagcagcatgcgcaggtcgttgagcaagtccttgcccttgaccttggcgtcgtagcgcagcaccaggttgccgtgcgggtcgacgatccacagttgcgcatcgccgggggcggcggcgtctttgttgaacgttgagaggtccagcgggtagcgctgcaattgcgggtattcggccttgagtttggcctcgtattcggtgctcaccggttgtgcgctggccagggcgtggctggcgcgcgaagcgtcacggcccaggctgatctgtaactggcgcgcgaggtacaccagttgctggcactcggcgaggcacgttgccggcgcggtgaccagcaattgccagcggacctcatctgcctgcacgccaatgtcggcgcgggtctggccattgccgatcatctcgccgtggtagctgcggctgtcaggcacccagaactgcagtttgtacatgaaggtcgccagcgccatcgggccgatcaccatcatcaggatcaggatcagttgccagcgacccttacgccggtccggcacctcagacatgttgagtggatttgtggccgcgcccatggtgcgtctcctttttgttatgcagtccgaggtagaggtaaagcgcgagcagcgccagcgacatggcgaaccactgcacggcgtagcccaagtgtttttccgggcccatggcgaccaccgcccacgtggtgtcgtacgtgccggggccggcttcggcgcgcagttcataggcaaagccgctgcggcccaactctgtccacagcgcggcagggtgcagggcggtgagcagacgcggccattgcgcggtcgcggggtcggggtgcagctggaaggtttcgccgggcgcgacgtacacccaggcgtcgaggttcaccggctgatcgggggtggtgaaggcgggtggcgtgcgccggtcgggccagggcagccagccgcgattgagcagcagccattggccgttggcctgatcgtggaagggttgcaacagctctacgccggccttgccgtcacgcatgcggttgtcgagcaatacgctgtgttctgcgtcgaattggccacgcaagcgaatgcggcgaaaggctgggtcggtcatgtcgttgagttgcgcactgctgacgggctcggccacgcggcgttcgttgtagctgtccaccagcagttgtttttcatggccgcgcgacagttgccagaagcccagccccaccatcaacggcagcagcaacatcaccaccactgtcggtgcgatgcctgggcgaaagcgtttcatggcgctggctatacttgttttcattgcccgcccatccctctcaattcctgacgcccggaacctgaccatgctcaaagcagccattgccctgatgctgatcgcgactgtcgtgagcctgttcagtggcttgttctttctggtcaaggacgagggcaactccaagcgcctcgtcactgccttgaccgtgcgtgtggtgctggccgtgatcaccgtggcgttgatcgcctggggctttttttcgggccagttggtatctcatgcgccttggtagcaagcctcacagcacatacacgaagaaaaacagcccgatccacaccacgtccacgaagtgccaataccaactggccgcctcgaaaccgaactggtgctcgttgttgaaatgccctttcaggatgcgcatcagcatcacaaacagaatgatggtgccgatggtcacgtgagcgccgtgaaagccggtgagcatgaagaaggtcgcgccgtaaacgccggagccaagggtcaggcccagttctttataggcgtggatgtactcctcagcctggaaagccaggaacgcccagcccagcagcacggtgattgccaaccagattttcaacgcgccgcgatgacctttgcgcaaggcatggtgggcgatggtgatggtcacgctggaactgaccagcaggatcgtgttgatcagcggcaagccccacggactgatagtgccctcgggcgccggatatagcttcgggtccggattgttgagcagcggccaggcaaattcgaagtttggccacagcatgtgcgcgatgcctttagagccctcacccgccagccacggcgcagacatatgccgcacataaaacagcgcgccgaaaaacgcgatgaagaacatcacctcggaaaatatgaaccaggtcatgccccaacggaacgagcgatccatctgcgggctgtacaaaccggcgcgactttccttgatcaccgcgccgaaccagccgaacagcatgtaggccagcagcagcccgccgacaaaaaagatccacgggccgtgggattccgggcgcgccgccttaaggtcgttgaaccatacggccaggccgtacacggtgatcaacatgccaaacgtcgcaattattggccatttgctttgcgctggtacgtagtacgtatcatgagacgacatgtattcgctctcctgattgagggggcaaacagtagctagcccccggtgtggatagccaccggcggttggcgcgcagtgatatcgaacagcgtgtacgccagggtcaaatgcttcacatccttgggcatgtcgcggtcgacaataaaacgcaccggcatttcgatgcgctgacctggctgcagcacttgctgggtgaagcaaaagcattcggtcttgtggaaatacatcgccgcttcagccggggaaatactcggtacggcttgggccgtcatggctttgtcggtggggttgtaggcgacgaacagcatctcggtgaccgcaccggggttgaccaccacttcgtcagccttggaatggaattcccagaccatgtcgatggcattggtcgacagaaactgcacgcgcacctggcgggtcgggtcgacgatttgctcgccctcgtactgcccggcggtcttgccgttgatgccgaaggctttgcacatcacgtcgtagatcggcacgagggcgaagccgaaggcgaacatggccacgaccaggatcagcaagcgggtgaccaagcgtttgatgggcacggagtcagccatggcgatcaccccgcttttgaccttctgtgggagctggcttgcctgcgatagcggtgtgccaggcaccgaacccacacactgacaggccctcatcgcaggcaagccagctcccacaggagaccgagccgggctgcatcaaagtgttcacttgacctccggcggcgtagtaaacgtgtgatacggcgcaggcgaaggaacactccactccagaccttcagccccatcccacggcttggccggtgcgggcgggccgccacggatgcacttgattacgataaacaggaagaagatttgcgtggcgccgaacatgaacgcgccaatcgacgacaccatgttgaagtcggcgaactgcaggttgtagtccggcacccggcgtggcatgccggccaatcccacgaagtgcatcgggaagaacgccatgttcatgcccacgaaagacagccagaaatgcagcttgccgagggtttcgtcgtacatgtggccggtccatttcggcagccagtagtaggccgaggcaaagatgccgaagatcgcgccgggcaccagtacgtaatggaagtgcgcgaccacaaagtaggtgtcgtggtactgaaagtccgccggggcaatcgccagcatcagcccggaaaagccgccgatggtgaacagaatcacgaaggctaccgcgaacagcatcggcgtctcgaaggtcagcgagccttgccacatggtgctgacccagttgaacaccttcacccccgtgggcacggcgatcagcagtgtggcgtacataaagaacaactcgcccaccagcggaatgccgaccacaaacatatggtgcgcccacacgatgaacgacaggaacgcgatgctcgccgtggcgtagaccatcgaggtgtagccgaacaacggcttgcgcgagaaggtcgggatgatcgagctgacggcgccaaacgccggcaggatcatgatgtacacctcggggtggccgaagaaccagaacacgtgctggaacagcacagggtcaccgccgccggctgcactgaagaagctggtgccgaagtggatgtccatcagcatcatggttacgcagcctgccaacaccggcatcaccgcgatcagcaggaaggcggtgatcagccaggtccagacaaacagcggcattttcatcagggtcatgccgggggcgcgcaggttgaggatggtggcgaccacgttgatcgcccccatgatcgaactgatgcccatcaggtggatggcgaagatgaagaacgtcacgctttccggcgcgtaggtggtagagagcggggcatagaaggtccagccgaaattcggcccgccgcccggggtaaacagcgtcgagaccaacagcagaaatgctgccgggagcagccagaagctgaagttgttcatgcgcggcagggccatgtcgggcgcgccgatcatcagcgggatcatccagttggcgaggccgacgaacgccggcattaccgcaccaaacaccatgatcaagccgtgcatggtggtcatctggttgaaaaacgccggttgcacgatctgcaggcccggctggaacagttcggcacgaatcaccatggcgaacgagccaccaagcaggaacatggtgaaggcgaaccacaggtacatcgtgccgatgtctttgtggttggtggtcaacacccagcgcatcaggcctttggcggggccgtgggcatggtcggcgtgaccatggtcatcgattacagtgctcatggccgttctcctgcaagcgagtgggcggggcggttcagggctttcgcaatgagggctgtcatttgctttccgcctgtttcagggccagcacgtctttgggcgtgaccatgtcgcctttgttgttgccccacgcgttgcgttcgtaggtgaccacggcggcgatgtccacttccgacagctgcttgccgaacgcggccatggcggtgccgggtttaccgaagtagacgcggtgcaggtggtcttccttggcgcctgtggcgatcggtgagcctttgagtgccgggaacatcggcggcaggccctggccttcagcctggtgacaggccacgcaggtggtgtggtagaccttgtcgccacgggccaccagttcttcaagcgtccattccttggaggtcagttccttgagcttggcggcttcttctttgcgctcgccgagccaggtgtcgtagtcggccttggatttgacttcgaccacaatcggcatgaagccgtggtccttgccgcacagttcggcgcactggccacggtagatgccgggcttctcgacgcgggtccaggcctcgttgacgaagccggggatggcgtcgcgcttgaccgcaaaggccggcacccaccaggagtggatcacgtcggcagcggtcaccagaaagcgcaccttggcacccaccggcagcaccaggggctggtcgacttccagcaggtaatgctcgcctttgacggcctggttatggatctgctcggcgggcgtggccaggttgctgaagaactccacatcctgacccaggtatttgtaatgccacttccactgatagccggtgacctggatatcgatatccgattcactgctgtcgtagatattgatcagggttttggtggccggaatcgccatcgccaccagaatcagcaagggcaccacggtccagagaatttccacggtcgtgctctcgtggaacttggccgccacctggcccgtggaccggcggtgcaggatcatcgaccagaacatcgcgccaaacacgacaatgccgatcaccacacaaatccagaaaatggtcatgtgcaggtcaaacacggcgtgactgacttcagtagcccctggcgccatattcgttgtccaggcggcatgcgcctggccgaataccgaccacaacagtaggcccatccaaacgtgtggatgtcgcgtcattgcgggttcccctttatgtttcttgttatcccgccggtttgcacctgcggcgaagggagcggcttccatactgcttacaaccgccaagccttgcctgcgtcatgcagttgggcgtcatcagctaattgcgtacaaacccgagtatagacagcacctgaaaccccgcaatgtgtacgggcaaatgagcaaaaacagacgggcggagccaataaaaccgggggcggaatcgtttatccgacgaacgatggcaattcgatataacgcgggcgcataaccatgaaataattatgacaaatgcgtcttaggcgctcgtataaacgagctaccttatcctctcccttttcctacgcctgtttcactggagccctcatgaacaccgccgcattgcgcgagcagatttcccgtgcccatcaacacgaagccaccacgggccagcttgcccagcaactggaaaaccaattgccgcacctgcattcggccatctccctggctgacggtgatcgcacccaagtaatgacccgctttgtcacggcctatatcgatcaagtgcccgacctgctggacgctgccaatgacgtcgcccgcgaagcgggaatcgaaagccaaatcaagccagtactgaaaatcgccgagcatttctttctgcaaccgccggcgattctggcgggccatgaagggctcaacggcctgctggacgaggcttacctggcgcatcgactggtcgaagaagtcaacgacctgtacatcaagcatttcggccagccgttgattccggcggacaccaccgtggccaacctgatcgcccaccaattgatcggcgagcagtttgccaaccagctggatgaggcggtgcatttggccgtggatgagatgctgaacgaagacagctttgcgctggagtcggtcgaggcttaccgcgagacgctgaaaagcccggacacggaagcggcgtggaagcgctggccgtgtttgtcgcgccagttgggggttgagttggcgctggatcagcctgcctgatttcctgacccgcaaacgttcaactgtgggagccgggcttgcccgcgatggcgatgtgtcagtcattgttgaattgactgacacatcgccatcgcgggcaagcccggctcccacattgttttgtggtgttccgggtcaggccgccgctgaccccaacccggccgtcgtgcgctcacggccttccagccgacgcttcaacccgcgggcctcgatcaccagcttcgagcccttcgctgcattcgcccggccccattcctccagcaactccaggcaggaatggtcgatgtaactcaggttattcaagggcacatgcacggtcgtcgcggcaggcaccgttgacagcacctgagtcagtgccggcactttcagaaaggtcgcagcgccgatcaatcgcagctccatctcgccgtcctgaggcaggtcgaccaggctgactttcagtcgcgaagccttgagcgccaacgtgacgagtgtcagcccgaagccgatcagtacacccgtcaggaggtcggtaaagacgatcgccaacgcggttgccgaataggtaaacatcggcatccgcccgtagcgacccaagcctttaaacgccttgatatccaccagcttgatcccggtgtacaccaacacacctgccaggctcgccaccggaatgctttgcagcacgctggacagcaacaacacgaatgccagcaaccacaaaccatggaacattgctgacaaacgcgtggtggcgcccgcctgcacgttggccgaactgcgtacgatcacaccggtcatcggcagggcaccgaccagaccgcagagcatgttgcctacgccttgtgcggacaattccttgtcgaaatccgagcgctggccgttgtgcatgcgatctaccgctgcggcagaaagcagggtctcggcactggcgataaacgccacggcgaatgccgcgatcaacaactgaggatcagccaggttcagcaagtcgctcggacgcagccagtcgatagcatccgcgaggttttctggaacttccacacgcttgacctgcaacgccagtaccaggctggtgaccgtcgccaagcccacacccagcagggcgccgggcacgaagcgcagttgttgcgggcggaatttatcccacaggtacatcaccagcatcgtcgacaaaccgagcaaaccggcctgccagcccaggccaccgccgagggtcggaatcgcttcggcgagcgccgccggaaagcccgccaggttatccaggcccgagggtttgggcgcgccgtcgagcatcacatgaatctgcgacagcacaatcagcacgccaatccccgccagcatgccgtacaccacggccggtgccgtcacccgaaaccagcagcccaaacgcaaacgcccggccaccaattgcaagaaacccgcgagcaacagaataggccccagcatcagcatgccgtgctggcgcaccagctcgaacaccaataccgccagacctgccgccgggccactgacctgcagcggcgaacccgccagccagcccaccaccaggccgccgatgatgccggtgatcagccctttggccggcggcatcccggaggcaatcgcaatgcccatgcacaagggcagggcgaccagaaacacaaccacggaggcgagcagctcccgtggcagcacagctttcaattgagcagcacgcataatggctctcccgaggcattcgccgggcgcggcaaagcctggctgcatccatggcagccaccgctttacccggcagggaagtgttttagaagcgcgctttaggcgtcgcgctagggatcggcccgtcaccgctcaacgagcggaatgccgcctgatcggcatcgtaggcgcggatctcactggtctcgatgttgtagatccagccatggataaacaaatgaccattggccatgcgcgaggccacggaagggtgggtgcgcaaatgttgcagctgggcgatgacgttttcttcggtcaacaccttcatgctttcgccttcattggcgcagtcgcagttgtcttcaaccatcgacttggccacttcagcgtgccgcagccaggcccgcactgtcggcattttttccaggctggcggggttgagtaccgcgcgcatggcaccgcaatcggagtgcccgcatacgatgatgtgctgcacgcccagcgccagtaccgcgtactcgatggcggtggaaacacccccgttcatctggccgtaaggcggcaccacgttgccgacgttacgggtcacgaatagatcacccggggagctttgggtgatcagctcgggcacgatgcgcgaatcggcacaggtaatgaacatcgcccgtgggctctgggccgtggcgagtttcttgaacagttcttcctgctgcgggaagacgtcgtgatggaaatgcaaaaagccgtcaacgatatgctttagcgctgcatcggcggtttccgccacctgaggggctgaagccgacgcagccaacggctgtttatccttatcactcatgattcatcctcttgattaatgcaggggagtggttcagctcagttcgacgcttggcctgtgcaatagttgtagagcatcacacaaacaacgcgttgactcatcagtcactcgctgaacaaggtagccgccgaaacttaactcaaactgaatgaaccgctctagaacgggggtttagatgatgtcaaagcgcgactattcctacgcaagcgtagggctattccccttcagtctacaacaacgccatctgcctgcccggtggacagaacgccgtgcaatccaggttgaaaccctcccgccgattcagccccaaccgcttgatcgccttgctgaaacgctgcgccagcaaatcggcaaaaggcccctcgccgcgcatgcgcacaccaaaccggctgtcgtacacctcaccgccgcgcacctgccttaccaggctcattacatgggccgcgcgctgcgggtaatgcgcggccagccattcctcgaacagcggcgccacttcgagcggcaggcgcaacatcatgtacgccgcactttgcgcaccggcggcgtgggcttcggccagcaggctttccagctcgctgtcgttgatcatagggatcatcggcgaacacagcacgcccaccggaatacccgcctcacgcatcacccgaatcgcccgcaaccgcgctttgggtgccgccgtgcggggttccaggatgcgcttgagctcatcgtccaggctggtgaggctgatcatcaccgccaccagccgttgccgggccagctcggtcagcaggtccaaatcgcgcaaaatcagcgagcccttggtgatgatggtcaccgggtgccggtaacgcagcaatacttcgagggtttgccgggtgattgtgtattcgcgctcgatcggctgatacgggtcggtattggagcccaggttgatcggcgcgcacacatagcccggcttcgacagttgctgttcgagcacgtcggcagcgttggtcttggcgatcagtttggtttcgaaatccagccccggcgacaggtcccaataggcatggctgggccgcgcgtaacagtagatgcagccgtgctcgcagccgcgatacgggttgatcgagcggtcaaacggcaagtccggcgagttattgcgggtaatgatgctcttggccgtttcaatgcgcacttcggtgccctgggtcggcggcacttcctgaaaccagccgtcgtcctcggccacgctgacggtcggggcaaagcggttatgcagattggtggccgtgccccggccacggggcggcaacggagtagacatgaaagcgcctctatactgtttttatatacagtatcgaggcgcgacgtttctgaccagtgccgtttggcggtcaggaatgaatcagtgcttttgcgtcacttggcccaggtcatcgcccgaggtagtgcgcatgtcactcttgcgcaggtcggccacatcactggccttcaccggtgcacccttattgccccagctgccacgtatgaaactgaccacatccgccacttcctggtccgacagccgccaggcaaacgccggcatggtgaaggtcgagggtgccgtgtgagtggccggcaaggtaccgccgttcaacacgatgttgatcaacgaggtggcatccgccgtctgcaacaccgggttacccgccaatgccgggaacacccgcgtgtagccatggccgtcggtgcggtggcaggccgcgcagttgtcgatgtacaccgaagcaccgggcttgctgtcatcgcctttccacagtgcctcggccacctgcttgtcgtactggtgcggctggtcttggggatccaccgccggcaagctcttgaggtaacgggcgatagcggtcaggtcgtcttgcgacatgtattgcatgctgtgaacgaccacatcactcataccgccaaacaccgcgctgcgatcactgcgaccggtcttgaggaattgcaccagttgctcctcgctccagctgccgaggccgtccttgtggtcgccgcgcaggcttttcgcgatccagccttccagcggcgcactgcccgacagaaacgcgttgccgtctgtggcactcagggctttttcctgcatggtcagggcgcgcggcgtatggcaggcgccgcagtggccgagcccttccaccaggtacgcgccccggctgatcaccgggtccgcagccgcttgggcctgatgctcctcgacagccggcgcaaacatccagcgccaggccgccaacggccagcgcatgctcaagggccacggaatgtcgctgtccttgtttgcctgggtgacaggttcaacgcccttcatgaagtacgcatacaacgcctgcatatcgctatcgctgacgcgcgcataggacgggtagggcatcgccgggtaaagcgtactaccgtttttggcgacgccatggcggacggccttgtcgaagtcctcgaagctgtagtcgcccaggccggtcttgtccggggtgatgttggtggagtagatcacgccgatcggggtttccatcggcaggccgccagcaaagggtttgccacccttggcggtgtggcaagccacgcagtcaccggcgcgggcgaggtattcgccctgtttgatcaggtcggtttcagccccgctgaccgagcaactgctgaacagggcaagagaggcaataacaagtgctttcatggtcatcgctccttatgcctgaaccagtgggccagggtttttcaggtactgctcgcggatcgcccgcgccgaccaataggtcaacgccgccaccaggccggtagggttgtagcccaaaccttgtgggaaagcggacgcgcccgggacaaacacgttgtgtacatcccagctttgcaaataacggttcaacgcactggttttcgggtcagtgcccatgattgcaccaccattgaggtgggtggtctggtaggacgccgtgttgaaatgctcaccgaccttcttgccgagcagggcaattgccttggggttcatcgcctcggcgaccttgctcatcttgtcgaccatgaagcggttcatcttgatgtcgttctcctgccagtcgaacgtcatccgcagcaagggcaggccgtaggcatcgcggtaaaccgggtccagatccaggtagttgccccggtaggattgatgcgcgccgtgggcgtccatcgacacctggtgggtgtagtaatcggcggtggcgcgcttccacgcgctgccccaggccggggtgcccggcgggttggaggtaccggcaatcggccggctgcccgcttggttgacccacatcggcgaaccgcccacaaacccgtggggcccgtggtcgaagttgtcggcgttgaagtcatcaatggccacgccattgccgcccgcaccgatgaaattgttggtgtgggtgtccttgtcgaaaaaggctttgatggtggccatgttctggtaggcgaagttcctgccaaccacaccttcgttggtaatcgggtcgtagggcttgccgatacccgacagcagcatcaaccgcacattgttgaactggaacgagccgatgatcaccagatccgccggttgctcgcactcgcgcccctggccgtcgatatacgtcacgccggtagccttgctcttggtgctgtcgaggttgaccttgagcacatgcgaattggcccgcagctcgaagttcggcacctggcgcagcgccggcaggatgttcacgttcggcgaggccttggagtacatgtagcacacgtagccactgcagaaaccgcagaagttacacgggcccatctgcgcgccgtaggggttggtgtaaggccctgaagtattggccgacggcaggttgtagggtttgtagccgacatccgcagccgctttctgaaacagttgtgcagagacggtatttttttgcgactccaacgggaacggattggaacgatccggcgcgtaagggttaccgccacggccttcgcccaccaactgacccttcaccgtccacgcctggcccgaggtgccgaagactttttccgcgtagtcaaaaaacggctccagctcttcatagctgacgccgaagtcctggatggtcatttccttgggaatgaagtttttgccgtagcgctcttcataatggctgcgcatgcgcagctcgatcgggtcgacacgaaagtgcacgcccgaccaatgcaggcccgcgccacccacgccattgcccggcaagaatgcgcccaactgccggttgggcagggcgacgtcattcacgctatggcgaatagtcaccgtctccttggagatgtcctgaaagagttttttacgcacgctgtaggtcaattcgtcgatgacctggggatagttgccgtccgggtaggtgtcctgcatcgggccgcgctccagcgctaccacgttgaggccagcttccgtcagctccttggccatgatcgcgccggtccagccgaaacctacgatcaccgcatcgacttttttcatgatggtcgccacgtttatgccctctcgccgcgaatggaaactgccgggaaggggtattgttcgttgcgttcaacccagtccatgaagtcggcgcgggcgccggggaagccaatcatggtccagccgaccatgcctttgttgccgccgtggatggggtcgcaaaagaacccttccttggtgttttgcagcagcaaattgaaaaacatcttcggtggcaccgaagcgaaatgcgcgctcacttcactgccgccggcctctagacggcgcaacatatcgtctcgggtagcgctgtcttgggcagcaaaaaccttaccgttaaacgccttcgaccaggcatccgtcgcggcaatacccaagcgatagatctctttgggcaccaatttgctctgccagcccatttccggcgcagcatcggcgttgaacggcccctgcatgaaccacagcgcgccactggcgtaaggcgtgttcatctggcggtcgatgtattccggcgcgccggcttccagggcaccagggccttgggcatcagcgggaatgagctgcgcgacggcggcgttgataaacgcccactcttcggcagtgaaatagctcggctcataggccttgtcgctcaccggcggcttggcaggcgcagcctgggccggctcgggcgtagccatcagcatcgagccgccaaggccggtgctggcaaccgtgaccaccgggatcaaggtcaaggatttgcgtaaaaagtcacgccgggggttgtcttgatcttgatcagacatgggtgcacctcatcatgtggtcacgggtttatccgccgcttctgggagcggcgtgaaggcttgccaaggaatgggatccaaagggatagaacacaccggcaatcaatagttacaaatgatagcagcctaaccatcgagagaatcgtttcagcgacaaaaacaccgtatcagtcgcgccgattcacgattctttgacgggtacctcacgccccattcactccgcgaaagccattctgtagccatcaacccttccctactcggtcacgtcgcgcatgttcatctttcgattgctgcctgctttcagcttggcgttcctggcattgttcgccaccgtcaacgccatggccgacgacgttgcgcccatccgcccgcccgaatgggcacagccggtgggcgaccaatacaacctgcaccaaatgaccccgacgctgtaccgcagcgcgttgccagacaacaacgcgctgccggtattgcagcaactgaagatcggcacggtgatcaacttcctgccggaatctgatgcgccctggctgaaaacatctgatatcaaacaggtacagctgacgtatcgcaccaaccatgtcgacgattccgacgtactggcggctctgcgggcgattcaggaagccgaggccaacggccctgtgttgatgcactgcaaacacggctccgatcgtactggcctgatggcagcgatgtatcgcgtggtggtccagggctggagcaaggaagatgcactgaacgaaatgaccctgggcggcttcggcagcagcaatggcttcaaggacggcgtgcgctacatgatgaaggccgatgtcgccaaattacgcacggcattgctcaacggtgaatgcagcaccagcgcgtttgccctgtgttcgatgaagagttgggtgaatacagcagaaacgggctcttgaattcagaacgcgctgcccggtggaacacccagaaacacgtgaactgactcaagcaacgaccgtgagtggcccggcgcaagtacacattcgcgaaatgcgcgtccggtcgcagcgttgaacacaccctcgcgttcaaaccttttaaacgctgaacgcgccagcacgtcagaccactggtaggcataaaacccaccctcataccccgacaccaggtagctgaagccattggcgtaacgcactgcgtccagcgcaggcaagtgcccgacctcacggttggcgctggcgaatacctgctcaatgctgcgcccgtcgccttgggtacggtgtagctcgatatcaaacaacgccagggtcaataactctgcgcgctcccaggacatttgagtgttggcgtataccacctgctggcgggccaacgcctcaggcaaatgagcacccgtgtcgacatggctggatagccacacaagacagtcaggggaatcacaccagcgctcgaagaactggccgcagaactccgcattgtccatacccaggtcatcaatgctcattttggtgcgataacccaggcccatcatcatctgttgcaagcaatggccgaactcatgaaacaggatcttgagctgccgatgcccgagcaaacaaggctcatcaggggccacgtcaaactgagtacagagcacgaccaccggctgcaccctgcgcccttcagcagtagtccagcggtttctcaacgaaaacgcgttggcaaaatcaccgcttttttgcagatacggcacgaaatagatgtagcccagcacctcgccatgggcctgcacctgcaagagtcgaacaccgggggtccaggcatcgaagccatccagctcgacaacctcgatatcgaacaggcgctttaccagtgcacacaggcgcagcaaggtggagtccagcgggaaatacctgcgcaacgcctcttcagcaatgccactggcctcttgccggattatctgcgccagaaacgcgtaatcccaaggctgcagatcggccagcccctgctttagggccagcgccgtgagcacttgcttgtcttgctcaaacgctgtgcgctgcgacgcaatctggtcgcgaataaagtccagcacttgctcatcggtctccaatacttggagctcaagtgccaattgaacaaagttggcgtgccccaatagctgggctttctggccgcgactggccaacagcatgtgcagcagagggccattatcaaactccccggcatgcggacccagctcggacgcacgcgtgttgtaagccgtgaaaacttcctctcgcagtgcacgattctgcgcgtacgccatgaggtcccggtacgtctcttcgttcagggtaatcagccagccttgcaggttcgcggcgcgggccttgtacgccatacgcgccttgagtgtcggcgcaagccccagcagctgtgattcatccgtgacgtgtttgcgccacgcctcgttggcctgctctaaccggttcaggaacaattgctggagcccagcgatttcacggttgagcgtcaccagcctctgctgcgcggcaggcgccaggttgatacccgccagttgaaactttttcagcgtgcgcctcagaaaactctgacgggaagcatcgaacaattcggccggggagctggtggccaatgcctggtagcaatcgaatagcgcgcggttgccggttaactcgcgcacaaactctacggccctgaacgtcgcttgcgcgctggcttccatccatttctgatcggtttttacgctgtcgaggatagagatcacccttaacatctcatcgagtcgcgatgtgacgagttctattgccagcaccaagtcatcccagtttgggctgtttcgctgactggccgtgatacgggcgacttcggcgcggctgcgcaatacgatcgcatcaacggcaggcacaaggtgttcggctcgaatggccgaaaaaggcggcaggtgatagtcctgcaacagggggttggcatcgggcatggtcgcttccttgagaacaacaagagggagttgtcatcctggaagacggcgcgggagagaagggtgtagatgtttaacacttcccaccctgaaaccgtgtatcagggcgggaagcgtcaaacggatcagtcttttttcaacttcggattaggaaaaaactgcaccgcctgcaccttggggtccggcgctttcaatgccgaggtgttaacccgcgtacccaactccttgggcaccgacaacccttggtcattgagtgtgtcggtataaccgcaggccacgcactcgcggtgcggcacgttgtcttcggtccacatcttcaacttgtccggctcgctacacgccgggcaaaccgccccggcgataaattgctttttggtaatcacaggcccttcactcatgctgccgcgtcctcactcaggccgctgtggcgcaagagtgcgtcaatcgacggtgcgcgtccgcgaaaatcgacgaacaacaccatcggcgcctgggagccgccgcgcgccaggattgcctcgcggaaggcgcgaccggtttcggcattcaacacgccgtcttcttcaaacttggagaacgcatcggccgacaacacttcagcccacttgtagctgtagtaacccgccgcgtaaccgccggcgaagatatgcgcgaagctgttcgggaagcggttataggtgggtgggcgcatcaccgagacttcatcgcgaacgccttccagcacttgggcaacgctgcggccatcgccgtgagtggcgtgcagctcgaagtcgaacaacgaaaattcaagctggcggaccatcatcagaccggactggaagttcttcgccgcgagcattttttccagcaggtcctggggcagtggctcaccgctttcataatgaccggagatcagcgccagaccttccggctcccagcaccagttctccatgaactggctcggcaattccaccgcatcccaggccacgccgttgatgccggagacaccggcgtgttcaacacgggtcagcaggtgatgcaggccgtggccgaactcgtggaacagcgtggtgacttcatcgtgggtcaacaaggcaggcttgccgctgtcggccggggtgaagttgcacaccaggttggccaccgggctttgcagcacgccatcgagggtgcggcgacggtcgcgcgcgccgtccatccaggcaccgccgcgcttgttggcgcgggcgtacaggtcgaagaagaaacggccgacatgctggccgttttccttgatttcaaacaggcggacatccgggtgccaggtgtcgaagcccttcagctcagcgatctcgatgccgtacaggcgctgcacgatggcgaacaggccgcccaacactttgtcgatcgggaagtaggcgcgcagggcttcctgggacacgctgtagcgctgctcgcggagtttttcgccgtagaaaccactgtcccagctttgcagatcagcgcagccttgttcggcggcgtaagccttgagctgctgcaggtcctgggcggcaaagggtttgctgcgcttggccaagtcacgcaggaaactcagcacttgatcgctggactcggccattttggtggccaggctcagctcggagaaggatgcgtaacccaacagtttggccagttcctgacgcaggtcgaggatctgttccatcaccgggccgttatcgttctgaccggcattcgggccttggtccgacgcacgggtgcagtaggcggcgtaaagctcttcgcgcaatgcacggtcctgggcgtaggtcatcaccgcgtagtagctcgggaattccagggtgatcagccagccgtcgaggcctttggcctgggcggcggcagccatttgcgccttggccgaatcggtcaggccggcgagggtggcttcgtcggtgacgtgtttggtccaggcttgggtggcgtccaacagctggttggagaatttgctgcccagctcggagagcttgctctgcacttcggcgtaacgcttttgctgctcgggcggcaaatcgatacccgacaggcggaaatcacgcagggagtgttccagaatagtcttttgcgccacgtcgaaaccggctgcttcggggctgttggccaaggcttcaaacgcctggaacagcgcgcggttctggcccatctcggtggagtaggcgctcaacgcgggcaggcagccttcgtaggcttcgcgtagttcggcgctgttgcacacggcattgagatggctgaccgggctccaggccgcgccgaggcggtcattgagctcgtccatcgccagcaccaacccggcccacgtagggtttttaccctggctttgcaggatgccttcgatggcgacacggttgtcggcgaggatctgttcgatggccggttgcacgtgctcggcacggatcgccgagaacggcggcaggtcgtaggactgcagaagcgggttgttcgcgctcacggtgggcaccttggctgaagaaacatgtaagaacaaagatggggccatcttaattacaatcaactcccaccgcagctatcagcaaaagagagagaggctatcgtgacccttcgcacctatcaaaaccacacgccaaccctgggcgccggcgcgtttgtcgatatttcggcggtggtgatcggcgatgtcgaaatcggcaccgacagctcggtctggccgctgaccgtgattcgcggcgacatgcaccgcatccgcatcggcgcgcgcaccagcgtgcaagacggctgtgtactgcacatcacccacgcggggccgttcaacccggatggcttcccgctgctgatcggcgatgacgtgaccatcgcccacaaagtcatgctgcatggctgcacagtcggcaatcgcattttgatcggcatgggcagtatcgtgatggacggcgccgtggtgggagacgacgtgatcatcggcgccggcagcctggtaccgccgggcaagaaactggaaagcggttatttgtatgtgggcagcccggttaaacaaatccgcgaactgactgacaaggaacgcgcctttttcacctacagcgcggcgaactacgtgaagctcaaagacctgcacctggccgaaggattcgatcaatgaccctgaaatacaccaccgttctgttcgacctggacggcaccctgaccgatccgcgcgagggcatcacccgttcgatccagtacgccctcggcaaactcggcattgatgagccggacctcaccaggctggaacactttatcggcccgccgttgctgcaagccttcatgcagttctacggcttcgacgaggccaaggcatgggaggcggtgaatttctaccgcgagcgcttcaaggtcaccggcatgtatgaaaaccgtgtgttcgacggcgtgatgccgctgctcgaagcgctcaatggccagggtcgccagttgtatgtggccacgtccaagccttgggtatttgcccgcgagatcgcccggcatttcgattttgccaagcacttcaaggtgatttacggcagtgagctggacggcacgcgcaccaacaaggtcgagctgatcgcgcatttgatgagcgaggaggggctggacccggcgaccacactgatgattggtgaccgcaagcacgacctgatcggcgcgcgcagcaatgggctggactcggcggcggtggggtatgggtttggtagttttgaggagttgaatgctgaagcgccgacttggcattttgaaacgctggatgagatgcatcagatgtttttgcagcgggcttgagattgctatcgcgggcaagcccgctcccacattggatcggcgaatgccttcaaaatgtgggagctggcttgcctgcgatgaggccctaaagcccacccccctccaactgtttcaacgccgccttgcgctgcgccaccggcaacccacccatcttctccaccgccgcaaaaaacctcacccaatccccatccacttgcgcaaacaacgccgcaaacgccggcacccaccggtcatacagcccgaacggcaacagccgcgcgttgttcatcggctggttgatccacacgtcaaaacgcttgtcgccgccccattggcggtcgcgcatctgccggtattcgctgcgcaggtgctcaaactctgttgccttggcttggcgcatcacatccgccgccaacggctgggcgtacaacgcttccaggcgtttgcgggtatcgagaatcaagcggatgaattggtcacgctgctgcaatgccgcatcgttgatcggcggcaaaccccgcgctgcgcgccattggcgcgtgccttcctgttcgacgaagttggcatacgactcgttgaactcggtgtcgtccttcacataaaaacgctgatgcgccagttcatggaagatcaacgtggccaggcgctcatcgccccagctcatcatcgaactcatgatcgggtcgttgaaccagcccagtgtggaataggcctccacgccgccaatcgagacgtccaggccctgctgcttcaacagcgccgcctcaccccgggctgcgccctggttgtaataaccgcgataggccacgcaaccggcgatggggaaacaatgggtctcaggcgagagggaaaattcctgcgtggcgaagacattccagaccacgtaaggccgaccaatgtcggcatacagcctgtaactttggttgtcaggcaaatgcaggtgttcgctggcgaaggtgcgcgccttttgcgactgcaccaaatggtgacgcaacgcctgggggcgtgcagggtcgccaatgacctcggaaaccggctcacgggcccgcagcaggtgccattggccgctcgccaactggctgtaataactcacgctggagcagccgctgagcagcaacaccagcaaccctggaagaaaacgcctcaccatgccttgaacaccccgtgggtaattggcttgccagactatcctgccctcacggaatttttccatggcacagcgtgtttatactcatagggagtctgctgccatcggcgccgggctcaattctttccttgcgcccgagtacctgccatgcgccagctcttgctacctgtcaccgccctgtttctcagcgcctgtacgtcgacgccaattcccccggctgacccgcaacaagcctgggtcgatttcgctacgccgacacccggcgccaaactggtgatggcccagcgcctggatggcaaaaacctctacgacgggcgcttcttccaggtgccgcccggcagccatgacctgatggtgcgctttgatttcgaggtgaacaccggcacggggattggcgggttggatcagacgcgcgaccgcacctgtttcatgtcattgcaatacaacaacttccaggcgggccagcattacgtgctggaagggcgctcgctggcgttcacgcccaacattcggctgtataactcggcgcgccaattgctggccgaagaacacagcgtgaactgcctctgatcagtcgttgttcttctggtagatgatgcgtttggtaccgttctcgcaggagccaacgatcatggcactgtcatgatttttggcttcctcggcggtgatgatttccagggtataagacggaatcgccttggcctgaatcttcacttcgatctctttcttgagctcttcacaatctttaggagcggccacggccgatgtggccaatacaccgcagatgatcgccaaggcaaaacgtttcatgtgtgaagctccctgaatgcactgcgcacgggtgtgcggccaagactgcatagcgtataggaccacatcacagaaacacgagttctgatttaacgcagaacaaaatgtgggaggggacatgtgtgggagctggcttgcctgcgatggaatcgcctcggtctaactgataaccgaggtgaacccatcgcaggcaagccagctcccacaaaagctccacattggatcttgctgtgtcagccgaccagggtggcatccaggctgattttcgcattcagcaccttggacaccgggcaaccttccttagccttcttgctcagttcatcgaactgcgcctggctggcgccggggatcttggctttgaggaccaaatgcacggcagtaatcgcaaaaccgccgtcgacttggtccaacgtgacttcggcctgggtgtcgatgctgtcagccttaagccctgcatcgcccagaatcatggaaaacgccatagagaaacagcccgcgtgggccgcaccaatcaactcttcaggattggtacccttgccgccttcgaagcgtgccttgaagccgtagggcgcttcgcgcaatacgccggtttccgtggaaatagaacccaagccagtcttcagatcaccttcccaatgcgcggatgcttttttaacgatactcatagcggtctcctcgaacggtggttttgcgtcagtaaggttctgaggatagacggcgggacaaagttcatcttgtcggagaaacctagcaaagcagtaggaaatttctcgatcagctattgaatctcgggtatatgccctcattgcatagaccatgcacatgaagcggcaggttttggttcgtctataagcctgcgcacctaatggagaagcaggcttatgaaatcgctgtccgacgtgaagttttcgaccctcgacctcgtgcccgtgcgcgccaacggcagcatcgcgcagtcgttgcgcaactctctggacctggcgcagcacgtggaaaagttcggctaccaccgtttctgggtggctgagcaccacaatatggatggcatcgccagctcagccacctcggtattgctgggctatctggccggcggaacctcgactatccgcgtcggctccggcggcgtgatgctgcccaaccacgcgccgctggtgattgccgaacagttcggcaccctggaaagcctctacccgggccgtatcgacctgggcctgggccgcgcgcccggttccgatcagatgaccgcccgcgccctgcgccgtgaacgctccggcagcgccgacgatttccccgacgatgtggctgaactggtggcctacctcggcccgcgcacgcccgaccaacgcatcatcgccgtaccgggcaccggcaccaacgtacccgtgtggttgctcggttccagcctgttcagcgcacagttggccggcgagcgcggtttgccctacgccttcgcctcccatttcgcaccgcgcctgatgcacgaggcgattcgcgtctaccgcaaccacttcaagccttcagccgtgctggataagccctacgtcatgctcggcattccgctggtggccgccgataccgatgaacaggctgactacctggccacatcggtgtaccagcgcatcctggcgctgatgcgcggccaaagcctggtgcagcgcccgccggtcaaaaccatggacggcctgtggctgccccatgaaaaagacgccgtgggcagtttcctcggcctggccatggtcggcagcccggcgaaaattcgcggcaaactggaagtgttgatcgagcaaaccggcgccgatgagctgatcttcaccagcgacctgtacgagcacgccgaccggattcattcctacgagctgctggcacaggcgatgaaaggctaaaccccaaacgaaaaaaacgacgcacctgtggcgagggagcttgctcccgctggagtgcgtagcgctccccagatttttggggccgctacgcagcccagcgggagcaagctccctcgccacaggtgcgtcgtctttatgctgtctgcaacacgggatcaaccgcgcttgtagacgatttccttggtgccgccttcgcaactgccaatcactttgccatcagcggctgcgcctttctcgacaacatccagcgaataatgctgaacgcctttagcgtcaagcttcgccgcgagttcgcttttcagctcttcgcaaggcttgcccgccgccagggctgtacccgcaatgctcaacagaccgactgctaacaggaacttcttcatccgttacttccttacgctgatcgaaaagaacgtgccgacgctgtcgcatcggcaccccaacgttgtagcgcaggttatggcaatcggccagtcagcaagttcaactcgcggcattaactactggcaattcggaaccccaccttcagcgtgacctgaaaatgcgcagccttgccgtccttgatgtggccacgggtttcggtcacttcaaaccattccaggtgcttgatgcttttgtgagcttcagcgatcgcgttgttgatggcgtcttcgatgctggtggtcgaggagccgaccagttcgactttcttgtacgtgtgatgatcagacatggcgtttctcctgagggctttagtgagcgtagcagtcaatgttcgtactgcttctggcgaccgttcctactcgaaagttcagatttactgcactttctgaaaacgctggagtcggtatctacacatgccactcaatcacttcaggagagtcccaatggccaacacttctttacgcaaagcgtcgctggaaagcatggaagccgagatttcgagcctgctcaaatctctggaaagcctcaaggacgatgcatccgacgagtcgcgcaaaaccttgaaggccctgaaaagcaatgccgagaatgcactcaagcactcccgccacctgatcagcgacgcctatgaagaaagcaaagtcaaaatccgcgaaaccggtgctgcaacccgggactacgctcaagagcacccgtggactacagccggtgttgcagtaggcgctttgggcctgctggccgcttacctgctgtgcaaacgcggcgattaaagcggttggcgcaacagctcagccttgagccactgcgccagttgccgagcgcgcccgtctgcggcgcgcttgggtagccacagcgccaggtgcgccggggtttcactgaaaccccatggcgccaccaggcggcctgctcgcaagtcctctgccaccagcggttcgggcgcaatcgccacgcccaatcccgccaccgctgcctccagcaaataatacaaatgctcaaacccctggccgtgtttcaacgcgcccggctcaatgccgtgttgctgtgcccaactgggccaggcttgcggccgcgacgtggtgtgcaacagcgcttcgccacgcaaggccgaggcaggcgcccggcacaggcgttcataaccagcaaagcgtgggctcatgaccgggccgatgcgctcgctggccagctcatacacctgcatatccactggccacggcggctctgcgaacaccaaaagcgcatcgagaccaggacgtcttggatcgagatcaccgtcacccgccgacagatgcaggcgcagatccggcaggtcggcattcaaacggcccaagcgcgggatcaaccagcgcgccagcaaactgcccgagcagccgagcacgaagggcgcgtctgcgctgctttgggtgagttcggcgcatacatcccttaaacgctcaaaggcctcactgctcgcgtcgcgcaaacggataccggcatctgtgagtttaaggccacgcccatccttgacgaacaagctgacacccaggtgctcctccaacactttcaattggcggctgaccgcgccgtgcgtcacatgcaattgctcggcagcctggctcacgctattgagtcgggcggtggcttcaaacgcgcgcaaggcattgaggggcggaaggtctcggctcatctgtgagttttcctgacaggttgcggcgatcttatcggttttcagcgtagaacgtcaggggtagagtggccctcattgtttcccatccccattctttcctggagcgtcccatgactcagtcccagaccgatctacgcaacggcccggatgccaacggcctcttcggcgccttcggcggccgttacgtcgctgaaaccctgatgccgttgatcctcgacctggcccgcgaatacgaagcggccaagatcgatccggccttcaacgaagaattggcctacttccagcgcgactatgtcggacgcccaagcccactgtatttcgctgaacgcctgaccgagttctgcggcggcgccaagatctacctcaagcgcgaagagctgaaccacaccggcgcgcacaagatcaacaactgcatcggccagattctgctggcacggcgcatgggcaaaaaacgcatcatcgccgagaccggcgccggaatgcacggggtggccaccgccaccgtcgccgcgcgttttggcctgcaatgcgtgatctacatgggcaccaccgacatcgagcgccaacaggccaacgtgttccgcatgaagctgctgggcgcggaagtgatccctgtcgtcgccggtaccggcaccttgaaagacgcaatgaacgaagccctgcgtgactgggtgaccaacgtcgacagcaccttctacctgatcggtaccgtggccggcccacacccctatcctgcgatggtgcgtgacttccaggccgtgatcggcaaggaaacccgtgaccagttgcaagcccaggaaggccgcctgccggacagcctggtggcgtgcatcggcggcggttccaacgccatgggcttgttccacccgttcctggatgacacaggcgtagaaatcatcggcgttgaagccgctggccacggtatcgaaaccggcaaacacgccgccagcctgaacggcggtgtacccggcgtactgcatggcaaccgcaccttcctgctgcaggacgacgatggccagatcatcgatgcccactcgatctcagcgggcctcgactacccaggcatcggccctgaacacgcctggttgcatgacatcggccgcgtccagtacacctcggtgactgatgacgaagccctcgacgccttccacaaatgctgccgcctggaagggatcattccagccctggaaagcgcccacgccctggccgaggtgttcaaacgtgcaccgaacctgccgaaggatcacctgatggtggtcaacctgtcgggccgtggcgacaaagacatgcaaaccgtgatgttccacatggaacactctgaaaaagaacactcttcgcaggagaaacactgatgagccgcctgcaaacccgcttcgctcagcttaaagaacaaaaccgcgccgccctggtgaccttcatcaccgccggcgacccgggctatgacacctcactggcaatcctcaaaggcttgcctgccgccggtgccgacgtgatcgagttgggcatgcccttcaccgacccgatggccgacggcccggccattcagctggccaacatccgcgcgctgaccgccaagcagaacctggcgaaaaccctgcagatggtccgcgagttccgcaaagacaacagtgacaccccgctggtgttgatgggctacttcaacccgatccacaaatacggcgtaccgcagttcatcactgacgccaaggaagccggcgtagacggcctgatcgtcgtcgacatgccgcctgagcataacggcgagctgtgcgacccggcccaggctgcaggcatcgacttcatccgcctgaccacgccgaccactgacgacgttcgcttgccgactgtgctcaatggcagctccggctttgtgtattacgtgtcggtggccggtgtgaccggcgctggcgccgccaccctggaacacgtcgaagaagccgtgacccgcctgcgccgccacaccgacctgccgatcagcatcggttttggtatccgtacgccggaacaggcagcggctatcgcacgcctggcagacggcgtggtggtgggttcggcactgatcgatcacatcgccaatgcgaaaaatgatcagcaagcgattgatggcgtattgagcctgtgcgcggcgttgtcggaaggtgtccgtaacgcccgtaagtaaacgccgtgtagcggtaggtaaagttcctgatacagaggaatcaatccgccgtaacagtacctaaagtgacaagacccagggatttcgaacctcgttcgaaatcccttttttgttcgtgcaggactgaggaaaaatccccatgaaaatgcctaaacgcttgatagccggtctcggtgtgctgatgctgggtgcgagcgccctggcgcaggctgcgccttacgatcaaggtggccctgaccgtggcggcccgcaaggtcagcacgaacaacgtggcgatgatcaccgtggccctcaggacaaccgtcgcggcccaccccaggacttcggcccggtaaggcaaatcatccacgacaaccacggccagttctcccgtggcgcaccgccacctcccaacgtgcgcctggtgcgcggccagccgttgccacgtggctactacggcgagcgcctcgacggccgagccctgtcgcgcctgccggtgtaccagggttatgaatggcgccgttccggcccggatgtagtgttgattgcagtgggcacgggcatcgtctacgaaattctcgacggcgtgctcaactaaaaactgaacgctgaccttgtagcgagggagcttgctccctcgctacagactcatttatccagttcgatgcgctcgactttacctaccagcaatacgtaagacaacgcccccagcaacgccagcaccgcgatgtaagtaatcgctggcgcaaatgaatccccacttgccagaaagccaatcacaatcggcgtggtgatcgccgacaagttaccgatgaagttgaatacgcctcccgtcagccccagcaacctggcgggtgccagggtggagaccagcgaccaggtgatcgacgccaaaccattgccaaagaatgccaccgccagaaacgcgatgacccacgccgtcgaatccacatagttggcgccaatgatcgccgtggaaatcagcaagccgccgatgatcggcaacttgcgcgcaaaacccaccgatgcgcctcggcgaatcagccagtcggaaaaaagccccgaacacagcacgcccacgaacgcagcaaggaagggcaacgatgccagcaggccggacttgataaagtccatgccgcgatatttcaccaggtaggtggggaaccacgtcagaaaaaaccacagcgtggagttcaggcagaactgccccaggtaaatgccccagagcttgcgcttgctcagcacgatgcccaaatccacccaactgaacggcgccttggtggcctgtgcctggatatccaccagcccgccgccctcacggatcagctcgatttccgccgcgttggcacctttgaaatccttgggttcgcggtacaccgcgtaccagatcagcgcccacagaatgcccacgccaccggtggcgacaaacaccatgtgccagccaaaagcatgttgcagccaagcgagtaccggcgtgagaaacgccagccccacaaactgcccggaggtgtagacgccaatcgccgtggcgcgctcacgttcgggaaaccaggtggtgaccacacggctgttgatcgggtaggccggcgcctcaagggcgccgaccgccatgcgcagcacgaacaatgcgataaagctggcggcaaagcccaacatcacagtggcgatggaccacagcaacaacgccaccgtgtagagaatgcgcggcggcacacggtccaccagccagcccccggggatctgcatggccgcgtaggtccagccgaaggccgagaagatcagccccacgtgcaccgggtcgatgcccaattcgctggtcagcgccggggcggcgatcgacaggttgctgcggtcgaggtagttgatcaccacggtgatgaacagcagcaccatgatgaagaaacgctttctgctgggcgtgaccaaagaagcctgcccggtgaaggattcagggtgcatgggggttgcctcttcttatggttattgaggacagttcgcggtcaatgtggagctggcttgcctgcaatagcggtggatcagcttgcatctctggaactgacacaccgctattgcaggcaagccagctcccacagttttaattgcatttcgtcagtcagaaatcaccactcggcaaagctgccgtcggcatgccgccagatcgggttgcgccagcggtggccgatggccgcccgctcgatcacgtattcctcgttgatctctatccccaggcccggcccgttggggattttcacgaagcctttgtcatagtcgaacacgcccgggtcgcgcacgtagtcgagcaggtcgttgctctcgttgtagtggatgcccaggctttgttcctggataaacgcgttgtagcaaacggcgtcgagttgcaggcacgcggccagggcaatcgggcccagcgggcagtgcagggccagggccacgtcgtaggcctcggccatgttggcgatcttgcgggtttcggtgatgccgcccgcgtgggaagcgtccggctggatgatgtcgacgtagccttcgctgagcacacgcttgaagtcccagcgcgagaacagccgctcgcccagggcaatcggcgtgctggtcagcggcgccagctctttgagcgcttcgtagttttcgctgagcacgggctcttcgataaacatcagtttgtacgggtccagttccttcatcagcaccttggccatgggcttgtgcacgcgcccatggaagtcgacgccaatgcccacgttcgggcccaccgcatcgcgcacggcggcaacgttggccagggccaggtcgactttttcaaagctgtcgacgaactgcagttcttcagtgccgttcattttcaccgcagtaaagccacgggccacagcctctttggcggcgcgggcggtgtcggcggggcggtcaccaccgatccacgaatacacacggatcttgtcgcgcacttggccaccgagcaggtcgctgacggacacaccgagggccttgcccttgatgtcccacagcgcctggtcgataccggcgagagcgctcatgtgcacggcgccgccccggtagaagccaccgcgatagagcacggtccagatgtcttcgatgttgcgtgggtctttgccgatcaggtagtcggaaagttcttcgacagccgccgccacagtgtgcgcgcggccctcgaccacaggttcaccccagccggtcacgccttggtcggtttcgaccttgaggaagcaccagcgcggcgggacgatgaaggtcgtcagtttggtgattttcatctgttatctctcttatagatgcggcgcctgtgggcgcggaacttgaaatcagctcagggcgttccaggcggcgacatacgcctgggcgcggctcgccacctggtccaccgtcatgcccggcttgaacaacccggaacccagcccgaaccctttggcgccggcgtcgataaacacctgcatgttgtccggggtgatgccgcccaccggcagcagcaatgtgccggcaggcaatactgcgagccacgccttgatcactgccgggcccatctgctcggccgggaacagcttcaacacgtcagcgccttcggccagcgcggcgaaggcttcggtcggcgtggcgacccccggcgacaggaacaaacctgccgctttggccgcgcgtaacaccttgggatcgctgtggggcatgacgatcacttggccacccgccgctttcacctgctcgacctgctccgccgtcagcaccgtgcccgcgccgatcaggcaatcggcgggcaggctgtcgcgcagggtgcggatgctggcgtacgggtcaggcgaattgagcggcacttcgatgacgcgaaaaccggcctcatacaacacttggccaacggcccgggcttcgtccgggcgcacgccgcgcaggatcgcgatcaaaccgttttgcgagagtgcgtctttaagcatgtctggcctccgttgcaggttgggtaagcccggccgccacagccaattgccacaggccgcgctcggtggcttcctgcgccaggctgacgtgagcaaagccgcagagggcgagggcgcgttgatagcgggcgcagagggcgggcgcgccgaccaggatgatcggtgtgtgtttggcgctgcccggcaggcccgcgagttcatggccgatcaacaggccggacaggtaatcaggttgctggtcaggggcgagatcgccggtcagcccgagggtccgggcgctgaacaacgtggacagcacgccgcgctcgccgtctgttgaaagcgccactcgcacgccacggtcaaaggcttcggcctggaagtgctcgctagactgttgagtacgaccgaggatgctgtgcttgctcagcaccgcgaacacttccccggtcatgaaggtgtcgaagtgggtgatgcagccttcgaccacttcgacccatttggaatggctgccgggcaggccgatcagcacgtcgggccccctgttttgcagcacgcccagcacctgggtttcttcgccgcgcatcacattgggcaaacccgccctctcaatcacgccaggcacgatatgcacctccacgccgcgcaggctgcgcacgcggtgcaatgcctggcccaggctggcgacgtccacgggggtattgcgatacgccgcctcactccagccctgagcgctgccgaccatgccgcaggcaatcaccggcaggccgcgttgcgcgtcgagccagtcgccgcaggcggcgtcgaaggccaactcgaaaccatcgctgcacagcacgccgccgatgttccggggctcgctgggcaggtgcatgatcccgaacgccagcgcgcgctgttcgagcaccacgcccgccgggccgagtttgtaagcacgaagggagctggtcccccagtcgagcgcgatcaaatgcgcctgcatcgcttcacctgaaatgagtgggtgctgaaaaaagcagatgggcgaatataaacctatggctagcgatatctcaatatataaataacagtcccatatattgggttaattcataaaaaatcccatcgccctgcttgagggtgacgggattgcaatcagaaccggttaaaaaatagacaggtccagctcacgcatggcgcccatccagatcgagtagtcggtgtggtctttcaaatcatcgccggtatcggggtgcaggaacaccaccagcccctcgcgatgcaacgccagccacggcagcacaacgccgatgtattcgggctcaaacgccaattggcagctccagtccgggtgcgggcccactgggcgttcgtgtacacggcccatgcgcaggggaaacagttgcgcagcgtcttcacacaacttgcgcgcttggccaatggtgctggcgtcgaaatagatgtgggcgtgatagcccttgatacgttgcatggcgaaatccgaatccgatatgcgccaaatcctagaccgcaatggacggcagggccagcccggtcagcgactgcgcgctgctggcttgctcggccaccagccagtcgacaaagcgctcgaccaactgcccgcggcgtttgcgctggggttgcaccacgtaataaccgaagcgcgaaatcaccgtatcgctgaccgggcggcacagccagttctgttccagcaggttatccaccaagtggcgccagccgatggccacgccctggccggcaatcgccgcttgaatcagcaaggtgtagttgtcgaaacgcagttggccgggagtcggcgcggcgctgatccccagttcgcgaaacacaccgctccagtcgaaccactggctgttgttttcctgacgcaaatgcagcaagggaaaatcgtgcaaattttgcacagtcagcggcttggcttgctccttgagccactgcgggctgcacaccgggaacacttcctcgttgaacagccagaggctgtcgccctgcttgaaacggccgtcgccaaacaacactgccacgtcgatatcgctgcgcaaggtggcgtggttgcgttcgctggtcaccaggctgacgtcgacctgcgggttggccacgtggaagcggtgcaggcgcggcatcagccagtaggcggcgaaggcaaagtcggtggccacttgcagcacttcgtgctggtcttgctgagtgatggcgctgaggccctggttgatcgtctgcaagccggcttgcacgtgctcgaacagcaaggcgccggcgtcggtcagctcaatgccccggtagatgcggtcaaacagcctgatcgcgagttgttcttccaggcgcttgatctgctggctgatggccggctgcgtggtgcccagctccatggcggcggcggtaaagctgcggtggcgcgccgccgcttcaaaggcgcgcagcaaatcgagggagacgtcaccgagggcttcatacataagctgtgcttatcctagacattgcttttcatgggctttaccccattttccatgggctgcatgctcattcgcataaacaccgcctatggaatgccgagaacccatgaagcgcaagaacattcttttcatcatggccgatcaaatggccgccccgttgcttccgttctacggttcttcgccgatcaagctgcctaatctgagccgtttagcggagcagggcgtggtgttcgacgccgcctattgcaacagcccgctgtgcgcgccatcgcgttttaccctggtcagcggccagttgccgagcaagatcggcgcctacgacaacgctgccgatttccccgccgacgtaccaacttatgctcactacctgcgtcgcctcggctaccgcacggcgctgtccggcaagatgcacttctgcggccccgaccaactgcatggttatgaagaacgcctgaccagcgacatctaccccgccgactacggttgggcggtgaactgggacgaaccggacgtgcgacccacctggtaccacaacatgtcatcggtgctgcaagccgggccctgcgtgcgcaccaaccagctggatttcgatgaagaagtggtgttcaaggcgcagcagtacctgttcgaccacatccgcgaagacggcgaccagccgttctgcctgaccgtgtcgatgacgcacccccacgacccgtacaccattcccaagccgttctgggacctgtacgacgatggcgatatccctttgcccacaacgcctgcgcaagctgatctcgacccgcactcccagcgcctgctcaaagtctacgacctgtgggacaagccgctgccagtgaacaaaatccgtgatgcacggcgtgcctatttcggcgcgtgcagctacatcgacagcaatgtcggcaaactgctgcaaaccctggaagacacaggcctggctgacgatacgatcatcatcttctccggcgaccacggcgacatgctgggcgagcgcggcctctggtacaaaatgcactggtttgaaatggcggcgcgtgtgccgctgctggtgagtgcgccggggcaatttgcggcgtgccgggtgagtaaagccgtgtccaccgccgacttgttgccgaccctggtagagctggccggtggtgaactcgacccgcgcctgccactggacggccgctcgctgctcccgcacttgcgggggcagggcgggcacgacgaagtgtttggcgaatacatggccgaaggcaccatcagcccgctgatgatgattcgccgtggtgcctacaaattcatctacagcgaagacgacccttgtctactgttcgatgtgcacaacgacccgcacgagcgggaagacctcagccagtcaccggaacaccggccactgttcgaggcgtttttgagtgaggcgcgggccaaatgggacatcccggcgatccaccagcaggtgctcgccagccaacgccgtcgccgtctggtgtttgacgcactgaccgaaggcaagctgaagagctgggatcaccagcccctggtggacgccagtcagcaatacatgcgcaaccatatcgacctcgacgacctggagcgcaaggcacgttatccacaaccctgccaaaaccaataaatagacagagggaaggccatgcgaaagttgactgtagtgttgggcatgctggcgttgagcagcgccaatgtgtacgcggacaccagctgtgacacggtgaagatggctgatccgggctggagcgatatcgccgccaccaatgccatcaccggttttctgttgaacggcatgggctacaaggccaaggtcgataccctcgcggtgccgattacatttggcgggctcaaggacggccaggtggatgtgttcctgggcaactggatgccggcgcagcagggcttctacgacaagttcgtggccaatggcgatgtggtgcaactggcgaaaaacctcgacggcaccgagttcaccctcgctgtgcccgactatgtgtgggacgccggggtgcatgactttgccgacttgaacaaatttgccgacaagttcgacaagaagatctacggcatcggctccggcgcgccggcgaatatctcgttgcaggaaatcatcaagaagaacgacttcgagctcggccagtggaagctggtggaatccagcgaacaggcgatgctcgcagaagtgtcgcgggcggtgaagaagcagaaattcgtcacctttctcggctggacgccacacccgatgaacgtgcagctgaaaatgcactacctcaaaggtggcgagaaatattttggtgacacaggcagcgtgtataccttgacccgcaagggctacgcacagtcctgcccgaacgtaggaaaactgctgaccaacctgagttttacccaggagatggagaacagcatcatggccgaagtggccaacaacaaggtcagcaatgccgatgcggcgaaggcgtggatcaaggctaatccggcggtgctggataaatggctcgatggcgtgaagaccgtggatggcaaggatgcgttggcggctgtaaaagccaagctctaaacctcaccgccaagccctgtggaaagcagctactgtgcaaactggtttgtgtgggagctggcttgcctgcgataggatcacctcggtcaaactgacagatcgagtcgtctgcatcgcaggcaagccagctcccacacaagcctgcttccacaggggccggtgtgtgctgataccctgatgcaaacctttcaacccgagcctttcatgccccggcccaaccgccacacccttttccctttcctagcctggctcccgcgccaaacccgcgccagcgtcggccgggacgcgattgtcggcctcagtggcgccgtactcgcccttccacaatcaattgcctacgcgctgatcgctggcctcccacccgagtacggtctatacgcggccatcatcccggtgttgatcgcatgcttgtggggctcgtcatggcacctgatctgcggcccgacggcggccatttccatcgtgctctacgccagtgtcagcccgcttgccgtgccggggtcacaggactacatcacgctgatcctgctgctgacattcctcgccggggttttccagtggctgctcggcatgctgcgctttggcgcgctggtgaattttgtctctcattcggtggtgctgggtttcacgttgggcgctgccgtggtgattgccttggggcaactgcccaacctgctgggactggatctgcccagccaggccacggcgatcaagagtttgctggcacttgtggatcacggcggggagtgggatcacgcctccctcgcgctcggggcaggcaccttgctggcaggcgcactgctcaagtgttgggtaccgcgctggccgacgctgctgatcgccctggccctgggcagcctggtcgcgtggctgtggcccgccatattcgggcatgtggcgctggtgagttcgttcgtgggcaaactgccgcccttcagcccgttgccgatggacctggacatgattctgcgcctgctgcccagcgccgtggccgtgggcatgctggggctggtgaccagcctgtcgattgcccgctcactgtcggcccggtcacagcaattgctcgatgccaatcaagaagtccgcgcgcaggggttatccaatatcgttggcggtttcttctccgggtatctgtcagccggctcctttacacgatcagggctcagctatgaggccggcgcgtgttcgccgctggcgggggtgttttcagccctgtgggtagcgctgtttgcgctgtttggcgcggcattgatcgcccacattccgatcccgagcatggccgcgagcatcctgctgatttgctgggggttggtggaccacaaaggcattcgcgccttgttccgggtgagccgtgccgagtttgtggtgatgggcctgacctgcgttgcgaccttgttgctggagctgcaaaccgcgatttacgcgggcgtgttggcctcgctgtttttctacttgaaacgcacctcgcagccccgcgttcagcaatggcgcgacggggatgaggatgtgctgcgggtgggcggttcgatctttttcggcgccagccattacctgcaagtgcgcctgcaaagcttgcagggcgagcgggtggtgattgaggcgcagcagatcaactttatcgactattcgggggtggagatgctgcaccaggaggcgcgcaggttgcgcggtttggggcggagtttgacgttgcgccgggcgcggccacaggtcgtagaagaactgaaaaaactcgagggtgccgacaactgccccctccatttcgaagactgaacgggatcaaaaatgtgggagctggcttgcctgcgatagcggtgggtcagccaacaagcctgtctctgacagaccgctatcgcaggcaagccagctcccacattgacggtgcccactttggattggggtcaggccaactgccggcgcagctcagccaacaccggcgccgacgccgggcgcacaccgcgccacaggtagaacgcttccgccgcctgctcaaccagcatgccgagaccgtccatcgccactgcggcgccttgctcggaagcccagcggcaaaatgcggtcggttccttggcatacatcatgtcgtagcaaaacgtcttgcccggttcgatcaagcttccggcaatcggcggtacatcgcctgacaggctggcggacgtggcgttgataatcaggtccaccggctcacgcaaccagtcgaaaccgctggcagacacggggcccaaatcatcaaacagctcggcaagccgttcggccttttccacggtgcggttggcgatgatcagcgaggccggctttttcgccagcaaaggctccaaagccccacgcaccgcgccgccagcgcccaacagcagaatgcgtttaccttgcaggctcaacccggcgttgaccgtcaggtcacgcaccaggcctgcgccgtcggtgttgtcgccgagcaggctgccatcggcccgtttgctcagcgtgtttaccgcccccgcacgttgggcgcgctcggtgagggcgctggcgagccggaacgcctcctccttgaacggcacggtaacgttggcgccacggccttgctgaaagaactcacgggcacaaccggtgaaaccctcaagcggtgcgagcaacgtgctgtagtccaactgctcgccggtctgctcggcaaacatgcggtgaatcagcggcgacttgctgtggccgatggggttgccgaacacgacataacgatccatcagttggccgcctttggcgcggcaacgccaagccagtcacggtcttgcaggaagtagtcagtgaggcgcgcttcttcgctgccggcctcggctttccagtcataactccagcgcacttgaggcggcagcgacatgaggatggactcggtacgcccgcccgactgcaggccaaacaaggtgccgcggtcgtaaaccaggttgaattcaacgtagcgcccgcgacggaactcctggaactggcgctgttgctcggtgtaagccatggccttgcggcgctgcacgatcggcaggtaggcgtcgatgtacgcatcgccaatggcgcggataaaggcgaagcaggtgtcgaaatcccactcgttcaaatcatcgaagaacagaccgccgataccgcgcggttcattgcggtgcttgatgtggaaataggtatcgcaccaagccttgtagcgcgagtacacgtctgggccgaacggtgcgcaggcctgttcggcgacgcggtgccagtggatgcagtcgtcttcgttgccgtagtagggcgtgaggtcgaagccgccgccgaaccaccatacgggctcttcaccttctttttcggcgatgaaaaaacgcacattggcgtgggacgttggtacatgcgggttatgcgggtggatcaccagcgacacgccgagcgcttcgaagccgcgaccggccaattccgggcggtgcgcgctggcggagggtggcaggccgctgccaaacacgtgggaaaagttgacgccgcccttttcgatgaccgagccgttctcgatcacacgggtgcgaccgccgccgccggcaggccgggtccaggcgtcttcgataaagcgagtgtccgtctcgaaggtttccagggcgctgcaaatgcggtcttgcaggtcgagcaggtaggcctttacagcctcggtgcgggtagtcatggcatcaccttgaatcgggcaaagctacgcgaggccattgggcgtcggcggcaaatgggcgcacaggataacactgcaccccctgccgccgcagttgacgaagatcaagcttaggagtccgatagggggctacgcgattcgacctcaggagaagtgcagatggccaaacgtatccagttcagtgcccatggcggccccgaagtgcttgagtatgtggactacacgccagcggagcctggcccacagcaagttcgcgtgcgcaacgaggccattggcctgaacttcatcgacacctatttccgcagcggcctgtatgcgccgccgtccttgccatcggggttgggcgcagaaggcgctggtgtggtcgacgcggtcggcagcgaagtcacccaattcaaagtcggcgaccgcgtggcctacggcagcggcccgcttggcgcctacagcgagttgcatgtgctgcccgccgccaacctggtgcacctgccggacgacatcagcttcgaacaagccgccggtgcgatgctcaagggcctgaccgtgcaatatctgttgcgtcagacctatgagctcaaaggtggcgaaaccgttttgttccacgcggcggcaggtggcgtaggttctctggcttgccagtgggccaaggcgttgggcgtcaagctgatcggcactgtcagctcgccggaaaaggccgcgctggccaaatccctcggtgcgtgggaaaccatcgactacagcaaggaaaacgtcgcacagcgcgtgctggagttgactgacggcaagaaagtcccggttgtgtacgacggcgtcggcaaagatacctggctgacttcgctcgatagcgtggcaccgcgtgggctggtggtcagttttggtaacgcgtcgggcgccgtggatggggtgaacctggggattttggcagctaaaggctcgctgtacgtcacccgaccgacgttggcgacctatgccaacaacccggaaaacctgcaggcgatggccgacgatctgttctcgatgatcaagagcggcaaggtgcgcattgatatcaaccaacggtattcgttggcggaggcggcgaaggcgcagacggcgttgtcggggcgacgcacgacggggtcgaccattctgttgccgtaaggcaatggattttcagggtcagtgatggcctcttcgcgggcaagcccgctcccacagttggaatgcgtttccctgtgggagcgggcttgcccgcgatgggcgcacctcggtctcaggaaggccgcaccacctcgcccgtggccaaatcacgaatcaggctcgggttcttgcgcccgcccaaagcaccgcccaacaccaggtcaacctggcctcggaaatactgctccactcggatccgtgtgcgggccgaagggcgcccctgtgggttcgccgacgtggaaatcaaaggcccgaccagcgaacacaaatcccgtaccagcgggtgatcgctgacccgcaaggccaccgtatcgtgcacacccgtcacccattccggcagcaagtcctgatggggcaccaaccaagtgttcggcccaggccaggtgctggccatgcgttcaatccaagtgtccgggaagtcttcgaacaggaagtcgaactggcggatattgtccgccaccagaatcaggcccttatccaccgagcgattcttgatcgccagcagccggtccaccgcctcttcattccacgggtcgcagcccaagccccagaccgcctcggtcggataggcaatcaccgcgcctgcgcgaatttctcgtgcggcttccagcacacgccacctgttgaccattgcttgttctccggactaaagctctgcgcagtttaccgatcttctttacaaaacctaattacaaaacctggcagcgcgcatgccagcgcccgctttcgcagaccaccaagccttctagttccagctcagtcagggttgccagtacctgggacaaagcccgcccgctggcaatggccaacgcttcactggtatggggcgccgcgtgcagcaaggttaccagcggatgggtcaccggcagcggcaccgggcacgacagcgcctgccagccgcgcaacccttccaggatatggtcgatggtttccaccagcatcgcaccgtcgcggatcaactggtgacaacccttggcgccggggtgatgaatggagctcggaatcgcgtacacctcacgaccttgttcagccgccagccgcgcggtgatcagtgagccgctggccacgccggcctccaccaccagcacacccagggacaggccgctgatgattcgattgcgtcgaggaaagttggcgggctggggcgccgtgtccagcgggtactcggaaaccacggcactgcctctggcaatcatcgcggcggcgagctttcgatggcgctgtggataaaaattttccagcccggtgccgagcacgccgattgtatgcccacccacatccaatgccgcctgatgcgcagccccgtcgatgcccagtgcaagcccgctggtgataacaaaaccagcgctcgccaggctgcgggaaaaggccgccgcggtgtccatgccggggcgggaagcgcggcggctgccgaccatcgccaactgtggcttttccagaatagtggggtcgccagcaacgaataataacggcggcgcatcctctatctgcgcaagcaatgccgggtagtcggggctgtcccacatcagcaaatgctgggccggacgctccagccatgccaatgcctcgctggcaccatcacgaatttgcgggctgcgccgggcctcggcactgacagcgggcaaccctagggaacgccaggcactggcgggtgcactgatggcctttgaagcgctaccgaacgcttcgatcaatgtgtgaaaccgcttcggacccagttccggaagcctgtgcaagcgtagtcgagcttccagttctgacggggaaatttcactgcagtttgtcggatacatctgatcgtccttgaccggaacaagctgtggataactctgttggtaacttatttagcaggctacttattgcgtttgacgggcagtcttgaatcggtccttcaccgccagcgcacgcgaggcgctgagcaccagcccgtagctgagcttttcataagtccgaaacaccagcagggtgccggcgcgttcgtcggggagttgggtttgagcatgggtaagagggtcgcgcacggtgacgccggttttgatgacgctcagcaattggccttcaaccaggccatcgcggcggcctttgttcagggtcacggcatctagcacaccaatgtgggcaacacctctggggacgtcgatgatgtgcccttcgacaagaggcccaggcgccagcctcgcaaggctggaaagctggataggcggttcggcacgcaataaacggtcaccggggcgcacctcctgggtgattcgctgcaccgccagggtggtgaggtcacccgcggtgacaaagcgtgccgtgccgatatcatcggcgttgatacccagtagctcccgggtttgcgggtcggtgtaggccttgccgcgccggaatatcccataaacaggctgagccgggtccaggttgccccgggcatgtacccgatccccctcagcgcccagcacgcgccccgaaccggccgaaacaatgtaaggcgcgcggtccagttcctgcgggttatccagaatgcggttatgcagtaaaaagcgctggatggcctgctgtgtcggttgatccagacgctgcgcgggctgtggcagcagggccatggcagacgggccccacagcagcaagacgagtagcgatttcctcatggggtgaatctcctttattatgtgcgttcgcgtgaaatgccagagccttcgcggcctttggacgtttcacaccggtcgtgtgggtccatcccaacgccgatttgcctctacctcacatgtgcagcaattacgcttatggctattttgaacatcctcgaatttcccgactcgcgcctgcgcacgatcgccaaaccggtggccgtagtggacgacaaggttcgtcagttggtcgatgacatgtttgaaacaatgtatgaagcgccgggcatcggcctcgccgccactcaggtcaacgtgcatcagcgcgtcgtggtcatggacctgtctgaagatcgcagcgagccacgggtgtttatcaaccccgagttcgaaccgctgaccgaagagatgggtgaataccaggaaggctgcctgtcggtgccggagttctacgagaacgtcgaacgcccgctgcgcgtgaagatcaaggccctggaccgggatggcaaaccctacgagctgatcgccgacggcctgctggcagtgtgcatccagcacgaatgcgaccaccttaacggcaagctgtttgttgattacctgtccacgcttaaacgcgaccggatcaagaagaagctggaaaaaaagcatcgccagcaagcttgatgcccttcttccaaaggcttgctacggcaagcctttttcttttgtgactgtttttaaccgagacctcccatgaccgagccactgcgcattgtttttgccggcactcctgaatttgccgccgaacatctgaaggccttgcttgccagcccttatcacatcgtcgcggtgtacacccagccggatcgcccggccggtcgtgggcaaaaactgatgccgagcccggtcaagcagctggcgctggcgcacaatattcctgtgctgcaaccgccgaccctgcgcaatgccgaggctcaggctgaactggctgcactgaaacccgacctgctggtggtagtggcttacggcttgatcctgcctcaagccgtgctggatatcccgcgcctgggttgcatcaacagccacgcctcgctgctgccacgctggcgcggcgcggcaccgatccagcgcgccgtggaagcgggcgacagcgaaagcggcgtgaccgtgatgcgcatggaagcgggtttggacaccggcccgatgctgctcaaagtcacgacgccgatcacggccgaagacaccggcggcagcctgcacgaccgccttgccgagctgggcccgcccgccgtgatccaggccatcgccggcttggctgcaggcacactgcaaggcgaggtgcaggacgacagcctggccacctacgcccacaaactgaacaaagacgaagcgcgcatcgactggagccgcccggcggtagagctggagcgtctggtacgcgccttcaacccgtggccgatctgccacagcaccctcaacggcgaagccttgaaagtgttggccgccacattggccgacggcaaaggcgcccccggtgaaatcatcggcgccagcaaggacggcctgctggtcgcgtgcggtgaacaagcgctgtgcctgacccgcctgcaattgcccggtggcaaggcgcttaatttcagcgatttgttcaacagccgtcgtgagaaattttccctgggcacggttctcggggcggttgctcaatgaacccgcgtctggccgccgccaaggctctcgccgccgtactcaacggcaaggcttcgctgaacagctcgcttccaacccagttggataaagttgaagaccgcgaccgtggtttcacccaggagctggcgttcggcaccgcgcgctggcagccacgtttgtcggcactcgcggccaagctgctgcaaaagccgttcaaggcagcggacgccgatgtcgaagcgctgctgctggttggcctctatcagttgctctatacccgtgtgcccgcccacgccgccatcggtgagacggtcggttgcgccgacaagctgaaaaagccttgggccaaagccctgctcaacgccgtgctgcgccgcgcccaacgtgagagcgaagcgctgctggccgagctggagcacgatccggtggtgcgcaccgctcacccgcgctggctgcagaaatccctcaaggccttctggcctgaacaatgggaagccatttgcgccgccaacaatgcgcacccgccgatgatcctgcgggtcaaccgccgccatcacagccgtgacgcctacctgcaattgctcaccgatgccggtatcaatgcaacgccgtgcgtgtacagcgtcgacggcatcgtgctcgaagccgccagcgatgtgcgcagcctgccgggctttgccgaaggctggatcagcgtgcaggacgaagccgcgcaactggccgccgacttgctcgacctggcgcccggccaacgggtgctcgacgcgtgctgcgcgccgggcggtaagacgtgtcacattctggaagtggaaaaagacctggccggtgtcgtcgcggttgacctggaagccaagcgcctggtgcgcgtgcgcgagaacctcgcacgcctgggcctgagcgccgacttgattgccgccgatggccgcgataccgccacttggtgggacggcaaaccgttccagcgcattctgctcgacgcgccgtgttccgccaccggtgtgatccgccgccacccggatatcaagctgacccgccaaccggacgacatcgccgccctcgccgtgctgcaaggcgaactgctcgacgcgttgtggccgaccctggaagtcggcggcatcctgctctacgccacctgctccacgctgccgaccgagaacaccgaagtcatcgtagccttcctggcccgcaccagtggtgcgcgggagctggacctcgctacagaggccggcatcaagcagccccacggtcgccaattacttgcacaggaaggcggccatgatggcttctactacgccaaactgatcaagatcgccgccgcgcgcggctgaacggttttaagggagtgaccggatgaaaatcatcatccttggggcagggcaggtcggcggcacgctggccgaacatttggccagcgaagccaatgacatcaccgtggtcgacaccgacagcgagcgcctgcgcaacctcggcgaccgcctggatatccgcaccgtacacggtcgcgcgtcgttcccgacggtgctgcgccaggcgggtgccgacgatgccgacatgctggtggcggtgaccaacagcgatgagaccaatatggtcgcctgccaggtcgcccataccctgttccacaccccgaccaaaatcgcccgggtccgtgaggcggcgtacctcacccgtgcagggcttttcgacaacgacgcgattcccgtcgacgtgttgatcagcccggagcaagtggtcactcactacatcaagcgtttgatcgaaattcccggcgccttgcaggtcatcgactttgccgaaggcaaggcgcaactggtggccgtgaaggcttactacggcgggccgttggtgggccagcaactgcgtcagctgcgcgaacacatgccgaatgtggaaacccgtgtagcggccattttccgtcgcgaccggccgatcctgccgcagggcgataccgtgattgaggctgacgacgaagtgtttttcatcgccgccaaagcgaatattcgcgcagtcatgagcgaaatgcgccggctcgatgaaacctacaaacgcatcgttatcgcgggcggtgggcaaatcggcgagcgtttggccgaggccatcgagagccgctaccaggtgaagatcatcgagatgaacccggcacgttgccggcatttgtccgacaccctggacagcaccgtcgtactccagggcagtgcctcggaccgcgacctgctgctggaagaaaacatcgcggatgcggatatcttcctggcgctgaccaatgatgacgaagccaacatcatgtcctcgttgctggccaaacggctgggggcgaagaaggtgatgaccatcatcaacaacccggcctatgtggacctgatccagggcggcgatatcgacatcgccatcagcccgcaactggccaccatcggcactttgctcgcccacgtgcgccgtggcgatatcgtgagtgtgcactccctgcgccggggtgcggcagaagccatcgaggcgattgcgcacggtgattccaagtcgagcaaggtgatcggtaaggccatccgcgatatcggtttgccgccgggcaccaccattggcgccatcattcgtgatgaagaagtgatcattgcccacgacgatacgatgatcgccaccggtgaccatgtgatcctgtttctggtggataaaaaacatatccgcgatgtggagaagttgttccacgtggggttgagttttttctgatgaacagtgggtgagcccactgccgtcatcgcgggcaagcccgctcccacagttggaaaccgatactctgtgggagcgggcttgcccgcgatgacgatattgaaaatcccggatagctaaaggacacacagcgatgctcgaatccctggaaaaaatgctcgccaagggtgtggataattcactgctgcgctttggcttgggcaagggttatctggacttgaaagacaatgccaaggcggcagagcatttggccaaatgtgtcgagtttgacccgaagtattcggcagcgtggaagttgttgggcaaggctcagcaagcgctgggtgacagcgccgccgcacggcaggcgtgggaaaaggggattgcagcggcccaggcccatggcgacaaacaggccgaaaaagagatggccgtgttcctgaagaaactcgaccgtcagccttgaggtgatacctgtgggagctggcttgcctgcgatgcaggcaactcggtttgtcagttccaccgaggtgatgccatcgcaggcaagccagctcccacatttgatctccattggcagggaggtcagcggtgagtcaataccaccgctcttcacccggcgggcgtttcttgaagcgtttcatgctccacatgtactggctcgggtaggcgccgacataacgctccaccaccttgctcatcgccgcgcaggacgtggcagtgtcggtgctgtacatatcttccggcgcagcttccaaaatcactttgtaacccgaaccgtccggcagccgcagcgcgtgcaggaacacgccgacggccttgtggcccgcgagcatgttcggcacgaatttactggtcagcgcctgggtggcgaagaacggtacgaagatccccgccgattccgccggctcaggatcagccgggatgcccacctggccgcccttgcgcacttccttgatcacactgaggataccttccttggtcgacgccgccacacggttgcccaattgcacgcgctgtttttgcagcagctcatccacagccttgagcttgggcgggcggtagaaaatgatcggtttgcattggttgcaatagaagtgattgagcacttcccagttgcccaggtggctggtgatgccgaccacgcctttgcccgacgccagggcttcgtgcagcacttccaggccttcgacttcgcgtaccagatcaatggaacgctgggccggccagatccaggcacaggcgctttcggtcagggacttgccgatgtccatcaggctctggccgacgaggcgctcgcgggcggccgggtccatatccgggaagcacttggacaggttgatccgcaccgtgtcgcgggaacggttgggggttttccacatgatccagccaattgccgtgcccacggcctgaacggcgcgccagggcaacagggcaaataaccgaagagcgcctaccagcaaggcgcctttaaacttttccacaggtcactcctgatcgtgtgtggtgcgcaaagccggcattctaaccggcgttggccaggtccgcgtaacggtcgcagtcctgggtgtggtccatgaccatgcccgaggcctgcatgaacgcgtagcaaatggtcgggccgacgaaggtgaaaccggcctttttcagcgctttgctcatggcttcggcctcggcggtgattgccgggacttcgctgcggtccttgaagtgattgaccttgggcttgccgccgacgaacgaccaaagcaaccccactggatcttccagcgccagccaggccgcggcattgcggcgggtggcgttgagtttgaggcgattgcgcacgatgcctggatcaagcatcaacgcttcgatttcgtcatcggtgagccgtgccagacgctgcgcatcaaacccgaacaggacctttcgataatgctcgcgtttgcgtaaaacagtgatccaggacaggcccgcctggaacccttcgagcaaaagcaactcgaacagtccctgcgcatcgcgcagcggcgttccccactcctgatcgtgataagccatgtacagcggatcttcagaacaccaaaagcagcgtggcataaggctccagggagtggtggcggggccgaatcgggtatactcccgctctttaaatcgcagcccaagtaacaggtgaatttcgtgagccagcctacgccagccgtgcgtaccttccaagacttgatcctcgccctccagcaatactgggccgagcaaggttgtgtggtacttcagccctacgatatggaagtaggcgccggcactttccacaccgcaacattcctgcgggccatcggcccggaaacctggaacgccgcttatgtgcagcccagtcgtcgcccgactgacggccgctacggcgaaaacccgaaccgtctgcagcattactaccagttccaggtggtcttgaagccgaacccggacaatttccaggagctgtacctgggctcgctcaagcacgtgggcctggacccactggtgcacgacatccgcttcgtcgaagacaactgggaatcgccgaccctgggcgcctggggcctgggctgggaagtctggctcaacggcatggaagtgacgcagttcacttacttccagcaagcgggcggcatcgagtgctacccggtgaccggcgaaatcacctacggccttgaacgcctggccatgtacctgcaaggcgtggactcggtctacgacctggtgtgggctgacggcccgttcggcaaagtgacctacggcgacgtgttccaccagaacgaagtggagcagtccacctacaacttcgaacacgccaacgtcgacaagctgttcgaactgttcgacttctatgaaagcgaagccaagcgcctgatcgaactggaccagccgctgccgttgccaagctatgaaatggtgttgaaggcttcccataccttcaacctgctggacgcccgccgtgccatctcggtaaccgcgcgccagcaatacatcctgcgtgtacgcaccctggcgcgttccgtcgcccaagcctacctgctggctcgcgccaagctgggcttcccgatggcaaccccggatctgcgtgatgaagtactggccaagctggaggctgcacaatgagtgctcaagatttcctggttgaactgggcaccgaagagctgccacccaaggcactgaacaccctggccgatgcgttcctggccggtatcgaaaaaggcctgcaaagcgctggcctgaaattcgccgcgaaaaaagtctacgccgcgccacgtcgtttggccgtgttgctgaccgcgctggaaacccagcagccggaccgcagcatcaacctcgacggcccgccacgccaggccgcgttcgacgccgaaggcaacccgactcaagcggccctgggcttcgccaagaagtgcggcgttgaactgagcgagattgaccagagcggcccgaaactgcgtttcagccaggtcatcaccggcaagccgaccgcgagcctgctgccgaccatcgtcgaagactccctgaacgacctgccgatccccaagcgcatgcgctggggtgcacgcaaggaagagttcgtacgtccgacccaatggctggtgatgctgctcggtgaccaggtcatcgactgcaccattctcgcccagaaggctggccgtgattcccgtggtcaccgcttccaccaccctgaggctgtacgtattacctcgccggccaactacgccaccgacctgcgtgctgcctacgtgctggccgatgccaacgagcgtcgcgagctgatcagcaagcgcaccgaagagctggcccgcctgcaggaaggcaccgccatcgtgccgccaagcctgctcgacgaagtgactgcgctggttgaatggccggtgccgctggtgtgctcgttcgaagagcgtttcctcgacgtgccgcaagaagcgctgatcaccaccatgcaggacaaccagaagtacttctgcctgctggacgtggacggcaagttgctgccgcgcttcatcacggtggccaacatcgagagcaaggacccgcagcagatcatcgccggtaacgagaaagtcgttcgcccgcgcctgaccgacgccgagttcttcttcaagcaagacaagaagcagaagctggaagacttcaacctgcgcctgcagaacgtggtattccaggaaaaactcggcagcgtctacgacaaggccgtacgtgtttccaagctggccgcctacattgcgccacgcattggcggtgacgctgcatgggctgcgcgtgcgggcctgctctccaagtgcgacctggccaccgagatggtcggcgaattcccggagatgcaaggcgttgccggctactactacgccctcaacgacggcgagccggacgatgttgccctggccctgaacgagcagtacatgccacgcggtgccggtgctgagctgccgaccaccctcaccggtgcagccgtggcgatcgctgacaagctggacacccttgtgggtatcttcggtatcggcatgttgccaaccggcagtaaagacccgtatgccctgcgccgtgcggccttgggtgtgctgcgtatcctgatcgacaagaagctcgacctcgacctgacccaggccgtcgtattcgccgtcggccagttcggtggcaaggtcaagcaagccggcctggccgagcaagtgctggagttcgtgttcgaccgcctgcgtgcgcgttacgaagacgagggcgtggacgtggccacctacctgtcggtacgtgccctgcaaccgggttcggcgctggacttcgaccagcgcgtgcaagccgttcaggccttccgcaaactgccggaagccgatgccctggccgccgtgaacaagcgtgtgtcgaacctgctgagcaaggccgacaacctcggcaatgccgaagtcgacccgggcctgtttgccgatgccaaggagttctcgctgaactcggccatcgccaaggcagaaaacgccgtgaaaccgctgattgccgaacgcaactacgccgaagcgttggcgcgtctggccagcttgcgtgagccggtggatgcgttcttcgaagctgtgatgatcaatgccgaagatgccggcgtgcgtaaaaaccgctacgccatgctggcgcgtctgcgcggcctgttcatcaatatcgctgacatttccgtactgggctgatcatgttgaaactgctgattctcgatcgggacggagtgatcaattacgactccgacgcttacatcaagtcggtggcggaatggattccactgcccgggtcgatcgaggccatcgcgcagttgagcaaagccggctggacagtggccatcgccactaaccagtccggcatcgcccgcggttattacgacatcgccacgttggacgccatgcacgcgcgcttgcgcacgttggtggccgagcagggtggcgaggtggggctggtggtgtactgcccccacgggccggatgagggctgcgattgccgcaaacccaagcctggcatgttgaaaaccattgcagaacattacaaggtgcccctggctgggctatggttcgtcggggacagcctcggtgacctggaggcggccaaagccgtcgactctcagcccgttttggtgaaaaccgggaaaggcgaaaagacccaggcgaaaaacctgccggtaggcactttgatttttgacgatctggcggcggttgccgcagaacttattaacaactagccaccctcggcttcctgaacaaggattgctcgggagtgcgcttttagcaggcgggccgtgtcccgcaacggtaaatgctgccatgtcgatcttgcaggccatcagaacctttttcttttacctgctgctgggcaccagttcgtttctctggtgcaccctgagcttttttattgcgcctttcctgcctttcaaggcgcgctatcgctttatcaacgtctattggtgccgctgcgcgttgtggctgaccaaggtattccttggcatccgtttcgaggtcaaaggtgctgaaaacgtcccggaccagccttgcgtgattctgtcgaaccaccaaagcacctgggagacgttcttcctctcggcctatttctcgcccctgagccaagtgctcaagcgtgagttgctgtacgtgccgttcttcggctgggccatggcgatgttgcgcccgatcgcaattgaccgagacaacccgaaggccgccctcaagcacgtcgccaagaagggcgacgagctactcaaggacggtgtttgggtgctgatctttccggaaggtactcgcgtgccctacggcaccgtaggcaagttctcacggggtggcaccgcactggcggtcaacgccaacctgccggtgctgccgattgcccataacgccgggaagttctggccgaagactggctgggccaaacgtgaaggcaccatcaccgtggtgattggcgagccgatgtacgccgaaggcgaagggccacgtgccattgcggccttgaatgaccgcgctgcagcatggaacgaagctcagcaacgcgccatgggttcactgcctccagagcccgttgtggtcgatacaccggcgatctgaagatctgtggataacctgtgtacggtttgttggcgaatggttgtttttgattcataagaagctgatttaattacatatttcttgaactcataaattcactgaaaacgtgcataagttttttccgaataaaaaaaccggtccttgtgaccggttttttatgcacagctgaaaagtacgtttttcaatcgtcgagcaagggcaactgcagggtgaaggtggagccttgtcccagtgcgctatcacacaaaatccggccgccgtggcgctcgaccaccgccttgaccatggtcaggcccagccccaatccctcactcccttgagctgagtcgaaacgtcgatattggttgaacagttcaggaaggtcttgcggcgcgatgccgggcccctggtcactgatacggcactccaacaagccctgcgcactgccatggctcaacgtaacggtagtaccggacggcgaatacttgatcgcgttctccagtacgttgaacagtgcccgggtgagcagcgactggtcggcgcaaaccatgccttcatccgcctcatccaaatcgtgaaccagatgaatacccttgagctgggcgatcactgccacctgatcaaaggcgtccatcaccagcatcgcgaacagcgtgggttggaagtgatagccatcagcttcagccttggccaactgcacgaaagactcggtgaggctcagggctcgtcgcacttgctgctcgatctgggcaaataccggtgactccccgttgtgcacgtccagcagtgccaggatcgctgaatggggcgcacgcaagtcatgggacagaaagcgcagcatcgtctcacggtgcagctgggcttcacgctctttgctcaggtcggtcaggctcaacagccagccaagggccacgtcaccttctgccggaagcaagggcgcgagttccatgcgcaggctgcgttggtgaatgtcacgaaactcgacaagctccatcgccgacaggacagggcgcacgccattgtgcagtggcgggtaacccaggtcggcgagttgttcgagcaagttaccgttgaccagatcattgccaaacacgtcacgcgcgacacggtttgccaacaacacgatgcctttgggatcggtgatcagggttgcgaccggcaggcattccaagccatcggccatgaagcgtcgggtgtcccgggtgcggctgaccgcttgctccagggcaaagatccgaccctgaagcacatcacctttgctggcaggtgcacggcgacgttcgggtaatactttgggctcattgtccaagcgcgccaattcccagccaaagtaagcgaggatcacgctgaggcgccgccaattccagatcaggtagctgagcagcaagccgatcaaacacgcggcgggtgaccaccaatgccccaaacgcaagagcgcccatgagccgagcaaggcgccagccatacaacccaacgtcatccacagggcatagcgtgggcggtacaacagaaggcccagcagcaatgccaccaaagaggttgccatcagcgctgaaagccagccagggaggtcgacgatactgcgcccttgcagcaagccattgaggatattggcctcgatctccacgccggcggtagtgccaaaggaagaggaaagcggcgtgataaaacgatcgcccataccataggcggtggcccccaccagaatcagacggccacgcagcaactctggcgaaacttcaccgcgcaacacactgacataagagacgctggggaaatgaccgtcagcggtgaacggaacacgaaccgcatgctccctatgccaatgcggggccgtcgctttttgggtaaatccaggcattggctcgggttcacccgtgagggtatacgccagccacgccaactgtgggagcgtgttgccgggcggaccttcgcgcagatacaggctgcgtaccacgccgtcattgtccgcttctacgttgacatgccccacgcccttcgcgcatttgaacaagggcatcaaacgctcgtccggcgggtgggcgctcaccgaaccctccgtcaccagcggcaggagcacgttgccggcgttgcagaccgcgtcagccaaccgctggtcttcggaagcttcgcccggttcactgaagatcacatcaaacaaaatgcctacaggtcgtgcagcaccaagacgatcaatcagatcagcgtgcaggctgcgcggccatggccattggccgagttgctgcaagctctgatcatcaatggtcaccaataagattcgcgggtcgaccggcaggggagtgaggcgccgaaggctgtcatacagcgggttattgagcgccaggccggcgctcaacgacaggtagacggtgaacggcagtagcaccaggccaatccacagccactcgcgcacaaggccgtggaacagtaactgggcctgagtgggttggcgtttttcggccttgcgccaccacatcacgaagctgccgccgcatagcaatagtgggtggttgttgatgtcatggccccggcttctccttccaggcgatgtttttggaatgtgatgtcctggaacccattgaagctcattcctgtctgagggaaagcctttcctgaatgtttcgcaggggaaactggcgactacgcctgaaaggccgttggccgcgatccttttccttactggcaggagccggtatcttccctttaggtctcgtggtcttttatagggttaaaggcgctttgatatcagcgtacccagagatccgagggtctttgaatctgaccacaattcttcagattcataggccggcatctgtgcagtatgtgcccgctttgaaccaggccatcggctgccgtattttttagtagaaaggacccacccatgcgtgtcgcaatattggatgacgagcccgctgaattgcgccgggttgagcagacactgcgacagatccccggcacctcggaacaaccctggtctttacattgcttcgagcgcggtgaggacctgctgcgccaactgcgccgggaaacgttcgacctgctcatactcgattggcaactgcccgatatcagcggtatcgcattattgcgctggacccgtgaacacatggagtcgccacctgccgtgatcatgctcacgagccgagacgccgagagcgatatcgtggcggcgttgaacagcggggccgacgactacgtcagcaaacccttccggcctaatgaattaaaagctcgggtcagtgctgtgctgcgccgtcatggcctgcaaaaaacggcctcacaggaagtacagagcttcaatgacctcaccttcgatgatgccgaactgaccgtaacccgcgcaggcaaaccgatcaacttgaccgagcgagagtatcgtctcgccagttgcctgtttgccaatctagcgcgcccgttatcccgtgagtatctttacgaacggttctggacccatgaagaaatggtgtcctctcgtcctttggatacacatatctaccgcctgcgtaacaagcttgggctgactgcggaccgaggctggcaactgctgaccatctacggttatggctatcgtctagagagcgtcgcagctgcgaccccaggttaaaactgcagatgttccacgtggagcatttagtattcgcttaatcatcatccaataaaaaaggccaacgctaagcgttggcctttttgttttagcacgttgatctgatcagaaatccaggttggacacggccaaagcattgctctcgatgaaatcacgacggggttcaaccgcatcacccatgagggtgttgaagatctgatccgcgccaatcgcatcttcgatggtcacgcgcagcatacggcgctgagcagggtccatggtggtttcccacaattgatccgggttcatttcgcccagacctttgtatcgctggatggtgtggcgtttggtgctttccgccatcagccagtcgagggcttccttgaattccttgacctgcttcttgcgttcgccacgctggatgtatgcgccgtcgtccagcagggtgctcaactgcgcgcccagggtaacgacggttttgtagtcattgctgccgaagaagtcgcggttgaaggtgacgtagttcgacaggccgtgggagatcagttcgacctctggcagccatacattacgttcacggtcttcacgcaggctggctttgtacaccagaccagacttttcgacagtacgcaggcgtacttcgtactgggccagccaatcctgcatcgctgcatgatcgcccaactgttccaggctgacggccggcaggtagatgaagtgctcggtcagttcctgagggtacaagcgcgacagacgcttgagggtcttcatcaccatgcggaagtcgttaaccaggcgctccagcgactcaccggagatgccaggggcttcgtcgttcaagtgcaggctggcatcttccagagccgactgtgtcatgtactcttccatggcgtcgtcgtctttgatgtactgctcctgcttgccctttttcactttgtacaacggcggctgagcgatgtagatgtagccacgctcgatcagttccggcaactgacggaagaagaaggtcagcagcagggtacggatgtgcgaaccgtcgacgtcagcatcggtcatgatgatgatgttgtgataacgcagtttgtcgatgttgtactcgtcacggccgataccgcagcccaacgccgtgatcaaggtgccgacttcctgggaggaaatcatcttgtcgaagcgcgctttctcgacgttgaggatcttacccttcaacggcaggatggcttgggtgcggcggttacgaccctgcttggcggagccgccagcagagtcaccttccaccaggtacagttcggagagggcagggtctttctcctggcagtccgccagtttgcccggcaggccggcgatgtccaacgcgcctttacggcgagtcatttcacgggccttacgcgccgcttcacgggcacgtgcagcatcgatcatcttgccgacgaccagcttggcttcgttcgggttttcgagcaggaagtcagagaagtacttgcccatttcctgctcgaccgccgtcttcacttcggaagacaccagtttgtccttggtctgcgagctgaactttggatccggcactttcaccgaaataatcgcggtcaggccttcgcgcgcatcgtcaccggtggtggcaaccttgtgcttcttggccaggccttcggcttcaatgtaggtgttcaggttacgcgtcaacgccgaacggaaacccaccaagtgagtaccgccatcgcgctgcggaatgttgttggtgaagcacaacaggttctcgttgaagctatcgttccactgcagggcgatttccacgccgatgccgtcttcacgctggatgttgaagtgaaacacctggttgaccgcagtcttgttggtgttcaggtattcaacgaatgcacgcaggccgccttcgtatttgaacaactcttctttaccgctgcgttcgtctttgaggacgatacccacaccggagttgaggaaggacagttcgcgaatacgcttggccaggatgtcccagctgaaatggatattcttgaaggtttctgccgatggcttgaaatgaatctgggtgccggtcgattcactgtcgccgacgattttcatcggttcttgtggaacaccgtggacgtaagtctgttcccagatcttgccactgcggcgtacggtcaggatcagctcttcggacagagcgttcaccaccgatacacccacaccgtgcaaaccgccggagactttataggagttgtcgtcgaacttaccgccggcgtggagcacggtcatgatgacctcagccgccgatacgccttcttctttgtgcacatcgaccggaataccgcgaccgttgtcgcggacggtgatggactcatccgggtggatgatgatgctgatgtcgtcgcagtgaccggccaaagcttcgtcgatggagttgtcgaccacctcgaacaccatgtggtgcagaccgctaccatcatcggtgtcgccgatgtacataccaggacgtttgcgtacggcatccaaacctttcagcactttaatgctggtcgagtcgtacgtgttttcttcgctcatgccttcactcccgatggtcgtgggtctgggtgatacggccttgttccacgtggaacaaagcgactggcgtttccgtctgccagccttccctcaataattcgtggtctacacaggtgataaacacctggcagcgtaagtcttccaacaagcggcataacgcgcggcggtgttgctcgtcgagttcagacggcaggtcatccaccagataaatacactgaccgcgtcgggcctggctaaccagatggccctgggcgatacgcaacgcacacaccaccaacttctgctggccacgggacaagatatccgcagcattgtgagcgcctaatctaaggcgcaaatcagcccgttggggtccggcttgggtgtgaccaatttgctgatcccgctgcagggaggtggcgagtactgcactcaattcacgctctttgtcccaaccacggtagtaactcaacgtcagcccttcgagatccaacaactcactcaaagtctgctcaaagactggtttcaaggctttgatgtaggcacggcggtattcatctatttcgtcgctggccaggcacaattcccggtcccaggccgcttgtgaagcggcgtcaagtgtaccatgccgcagccatgagttccgctgccgcagggccttctgcaggcgctgccacgtggccatgaaacgcggttccacgtggaacactccccaatcgaggaattgtctgcggatttttggcgcaccttccaacagcctgaagctgtcggggttgatcaattgcagcggcaggatttctgccaactgcgccgcactgcgcgcgttttgaccatcgatacgaatctgaaactccccgccgcgatcacgggatatccccaaggcactgtgcccaccttcagccagttcgacttggccaaacacggtgcacgccaattgttcgtactggatgaccggtaacaagcgggcgctgcggaacgaacgggcaagccccagcaggtgaatggcttccagcacgctggttttgccactgccattggcgccatggaggatattgatgcggggggagggagagaaggtcaccgggtgcagattgcgcaccgcggtgacagagacgcgactgagggacatctagcttctgctgagcatgattacaggcgcatcggcataacaacgtaagccgagtcgtcgttgtcggattcctgcaccagggcgctgctgttggagtcggacaggatcagacgaacctgttcggtggtcatcacgcccagcacgtccaacaagtagctcacgttgaagccaatttccaggttgccaccgttgtagtcgacgcccacttcttcttccgcttcttcctgctccgggttgttggcctggattttcagctgaccgttagccagttgcagacggatgccacggtacttctcgttcgaaagaattgctgtgcggctgaacgcttcacgcaaagcctgacgatcccccagcacgagcttgtcaccgcctttaggcagtacgcgctcgtagtccgggaatttgccgtctaccagtttggacgtgaaggtgaactcgccggtggttgcgcggatgtggtgctgacccaacacgatgctgacattaccatctggctcagtaagcaggcgtgccagctcaaggatacccttgcgcggtacgatgacctgatgacgatccggctggccgatatcggctttcatcgagcacatggccagacggtgaccgtcggttgccaccgcgcgaataatgccttccgacacttccagcagcatgccgttgaggtagtaacgtacgtcctgctgggccatggcgaagctggtgcgctcgatcaagcggcgcagacggctctgttccaggctgcaggtcagcgagccagggccctcttcaacagtcgggaaatcattggcaggcaaagtggacagcgtgaatttgctgcgaccagccttgaccaacagcctattctgttcgtcgaccttgatatcgatcagcgcgtcgttaggcagactcttgcagatgtccatcagcttgcgcgccggtacagtgatctcgcccggttcagcaggctcttcaagctgtacacgaccgaccagttcgacttccaggtcggtaccggtcaaggacaattgctggccttcgaccaccagcaatacgttggagagcaccggcaaggtctgtcggcgctcgacgacgcctgcgaccagttgcaggggtttcaacagggcttcgcgttgaatggtgaaatgcatggtctagtcccttgccttaataagctgcgctggtgtcatcaagttgtcagtgtacgcagcaggttcttgtagtcctcgcgaatatccgcgtcggattccttaagttcattgatcttgcggcatgcgtgcaagaccgtggtgtggtcgcggccgccaaacacatcaccgatttccggcaggctgtggttagtcaactctttggagagagccattgccacttgacgcggacgggctaccgagcgcgaacggcgcttggacagcaagtcggaaatcttgatcttgtagtactcggccacagtgcgctgaatgttatccacactcaccagcttgtcttgcaacgccagcaaatctttcagggattcgcggatcagctcgatggtgatgtcgcggcccatgaagtgcgagtgagcgatgacacgcttgagcgcgccttccagctcacgcacgttggagcgaatgcgttgggcgataaagaaagccgcgtcgtggggcagatcgactttggcctggtcggcctttttcatcaggatcgcgacgcgggtttccagttccggcggttccaccgccacggtcaagccccagccgaagcgcgatttcaagcgctcttccaggccttcgatttccttcgggtaacggtcgctggtcaagatgacctgttggccaccttcgagcaaggcgttgaaggtatggaagaattcttcctgggaacgctctttgcgggcgaagaattgaatgtcatcgatgagcaaagcatccaccgaacggtagaaacgcttgaactcgttaatggcattgagctgcaaggccttaaccatgtcagccacgaaacgctccgagtgcaggtacacgaccttggcattcgggttcttctttaatagatggttacccacagcgtgcatcaagtgagtcttacccaaaccaacaccaccataaaggaagagtgggttgtaaccatgcttggggttatcggcgacttgccaagcggctgcgcgagccagctggttggatttaccttcaacgaagttctcgaaggtaaaagtgcgattcaggtagctggtgtgcttgagcgcgccttccacctgcacggtgcgctgttcggcgcggaccggcgcttgttgggagctggcgcccgccatcggatcaaagctgtcgcgggacggctcttcatttgcaggagcgtttttctgcgacgacgacttcgcaggcgcctgggaaaccgacggcggcacgttattaaccggcgccgccgcggcctgcgcctgcgaggcactggctgccagcggagcattcggcgcagcgcgaggcgcggagctgcgtttgctgcctattaatagagaaagcacaggggcgatgccattgccgtgttcatcgagcaattcgagaacgcggctcaggtatttctcgttgacccagtcgagaacgaaacggttgggcgcatagacgcgcaactcgtcgccttcggcttcgacctgtagcggacggatccaggtgttgaattgctgggcaggcagctcatcgcgcaaaagctccacgcactgctgccaaagttccactgacacggatatcccctaagttgaaagccggtgaggcaaaaacagccgccattgtagcggccagccgcccacttatccacatgtaggttgctcacagggcagccaaaatcaacgctttaggcacaataaaggcgaccaatggtctgtgcataagctctgtggataagcgtgcctgagctcgttgtacaagtgggggcgaaagtctgtgggtaactggcctgtggataacaacctgtttcacacacagcttatccgacagcgcagcacaggcagagcaccgttttcccccgtagttgtcattctctgtacatcacgtgaaataaggccttaaggcagttatccacagatgaacctgtgcctagcttttataagctttacagaaaagctttaaataacttccttctttatttttatatctatggcattgcccatgtaatcccctggctcagaaaaacacctcaagacctgtcgagatctaattaaaggaaaagctggttggaaattgacctagaggcttgctttctctagaatcgccggtctcttaaaacgggggccattccggcccgttgtggacgaaccaggtaacaacgccatgaaacgtactttccaaccaagcaccatcaaacgcgcccgtacccacggcttccgtgctcgcatggccaccaagaacggccgtgctgtcctgtcgcgtcgccgcgccaaaggtcgtgcgcgtctggcagtttgataatcaggtactggtggtgagtcaggacttcagtcgggaaaagcgtttgctgaccccccggcatttcaaggcagtctttgactcccccaccggcaaggttccggggaaaaatctcctgctccttgcgcgtaacaacgatcttgatcacccccgtctcgggttggtgattggcaagaagagcgtaaagctctccgttgagcgcaatcgcctcaagcgtctgatgcgcgaatcgtttcgcctccaccaggacactctggttggttgggatattgttatcgtcgcgcgcaaaggcttgggggacgtagaaaaccccgaattgattcagcatttcggcaagctctggaaacgtttggcgcgtaccaacaagccagcaccagcagtcagcaccgaaactgtaggggtagacagccttgatgcgtaaactggcaatcgttccgatccagttttaccgctatgccattagtcctctgatggccaaccactgtcgtttctaccccagttgttcctgctacgcgttagaggccattgaaaatcatggtcttctgcgcggtggctggttggcctttcgtcgtttaggtcgctgtcatccgtggaatcccggtggttttgacccggttccacctatccctacctcccgttcttcttcgatggccgagtaatcatggatattaaacgcacaatcctgatcgtcgccctggcaatcgtgtcctactctatggttctcaagtggaaccaggactatggtcaggctgccctgccgactcagaatgttgctgccaaccaggctgcgccggctattccggacaccccgttgggtaacaatgcgtccgcgagtgccgatgttcccagcgcgaatggcgagacaactgcccctttagaaacgccagttgttaccaataaagacctcatccatgtgaaaacggatgtgctcgacctggcgatcgacccacaaggtggtgatatcgcgcagctgaagctgcccctttatccacgtcgccaagaccatccggatgttccgttccagctgttcgataacggtggcgaacgtacttatctggcgcaaagtggcctgaccggtaccaatggtccggacgcgcgtgctaccggccgtccggtttattcgaccgaacagaagacttatcaactggctgatggccagaaccagttgaacgttgacctgaaattcagcctcgacggcgtcaactacatcaagcgtttcagcttcacccgtggtttgtacgacttgaaggtcacttacctgatcgacaacgaaagcgataaaccgtggagcggcaacctgtttgcccagctcaagcgtgacaacagcgctgatccttcttccagcaccgccaccggcaccgcgacttacctgggcgccgccctgtggacaagtagcgagccgtacaaaaaagtgtcgatgaaagatatcgacaagggcgcgttgaaagaaacggtccaaggcggctgggttgcctggttgcaacactacttcgtgaccgcatggatcccgaacaagggtgaagccaacctggttcaaacccgcaaagacagccaaggcaactacattattggttttactggcccggcgttgactgtcgcacccggtgccaaggctgaaaccagtgccactctgtacgccggcccgaaaagccaggccgtgctcaaagagctgtccccaggtctggaactgactgtggattacggcattctgtggtttattgcccaaccgatcttctggctgctgcaacatatccacagcatcgtcggtaactggggcttctcgatcatcttcctgaccatgctgatcaaagggattttcttccctctgtcggcagccagctacaagtcgatggcgcgcatgcgtgccgtggccccgaaactggcggctctgaaagaacaacatggtgatgaccggcagaaaatgtcgcaggccatgatggagctgtacaagaaagagaagatcaacccgctgggtggttgcttgcctattctggtgcagatgccggttttcctgtcgctgtactgggtactcctggaaagcgtggaaatgcgtcaggcacccttcattctgtggataactgacctgtcgattaaagacccattctttattctgccgatcatcatgggcgcgaccatgttcatccagcagcgcttgaacccgactccgccggacccgatgcaggccaaggtcatgaaaatgatgccaatcatcttcaccttcttcttcctgtggttcccggctggcctggtgctgtactgggtagtcaacaacgtgttgtcgatctcccaacagtggtacatcacacgtaaaatcgaagcggctaccaaaaaagctgcggcgtaatttaccctgtggataaccactcaagacgccccctagtggggcgttttgctttccgtcacttttgtactggaacctgctgatgagcgctcctcgtgaaaccatcgctgctgtcgctaccgctcaaggtcgcggcggtgtcggtatcgttcgaatttccgggccgctggcgagcgtggcagccaacgcaatcagcggccgggagctgaagccgcgttacgcccattacggtcctttcctggatgctgacgagagtgttttggacgagggcctggcgctctattttccaggacccaactctttcaccggtgaagacgttctggaactgcagggccatggcggtccggttgtgttggatatgttgcttcagcgttgcctgcaactgggctgccgcctggcacgtccgggtgaattcagcgagcgggcattcctcaacgacaaactcgacttggcccaagctgaggcgatagccgatttgatcgaagccagttctgcacaggctgcacgcaatgcattgcgctcgctgcagggggcattttccctgcgtgtgcataacttgaccgagcagctgatcagtttgcgtatctatgttgaggctgccattgattttcccgaggaggagatcgactttctcgccgatggccacgtcctgaagatgctggataaggtccgcgaggagttatccaccgtgttgcgtgaagcaggccagggagccttgctgcgtgacggcatgacagtggtgatcgccggacggccgaatgccggcaagtcgagcctgctcaatgccctggcgggtcgcgaagccgccatcgtcaccgagattgcgggtaccactcgggatatcttgcgcgaacatatccacattgatggcatgcctctgcacgtggtcgacaccgctggcctgcgcgataccgatgaccaggtcgaaaagatcggcgtggaacgcgcgctcaaggcgatcggcgaagcagaccgggtgttgttggtggtggatgcgactgcacccgaagctgtggatccttttgccttgtggcctgaattcctcgagcaacggccggacccggccaaagtaacgttgatccgtaacaaggcggacctgaccggcgaagccattgctatggagaccagccaggacggtcacgttacgatcagcctgagtgcaaagtcggctggcgacgggttggaattgctgcgcgatcacctcaaggcctgcatgggctacgagcagacgtcggaaagcagcttcagtgcacgccgccggcacctggaggcactgcgtcatgccagcgcagcgttggagcatggtcgcgcccagctgaccttggcaggggctggagagctgctggctgaggatctgcgtcaggcacaacagctgttgggggaaatcaccggcgcattcagctccgatgacctgcttggaaggatcttctcgagcttttgcatcggtaaataacccttcgttgttcacaggcaggccgttcgtgcctgcctgtttcgcccgcgtcagggcattccaaatccaattttgactcactgcccaaaagaatggcggcttctgcgcgggcgtcattgggcgatgtggccattttctgtggattaagccctgtgaataacccaccttgtgctcagttgataacagggcgtgaaacctgagtaaaaacccctctgtggataaccagtgctttaatccacaggcttaaaccacttatccaagggcctcattggcacatgaccacagacttttgaaactctgtacaccacgtgaatcaagggctgtgtagatctatccacagaaaacatcctcagtagaaataaacataaaaacaaagatcttataaatttcttctcttttaatttctattgtctgtgattcatccacagctggttaaattttgtgcaaagggttctttaggaggggctaagtccctatacttgccgccaaagctccaaaaccctttcaacagacaattcctgattacctacataagcaggcacgaggtgcgtggtggatttcccttcccgttttgaagtgatcgtcatcggcggcggtcatgccggtaccgaggcagcactggcgtcagcacgcatgggcgtaaaaaccctgttgctgacgcacaacgtggaaaccctcggtgcaatgagttgcaaccccgcgattggtgggatcggcaaaagccatctggtcaaagaaatcgacgcccttggcggcgtcatggccatggccaccgacaagggtggtattcaatttcgcgtgctcaatagccgcaaaggcccagccgtgcgtgccactcgggctcaagccgaccgcattctgtacaaggcggccgtacgcgaaaccctggaaaaccaaccgaacctgtggatatttcaacaggcagcggatgacctgatcgtcgagcaagaccaggtacgtggtgttgtcactcagatgggcctgcgtttcttcgcagaatccgtggtgttgaccaccggtacgttcctcggcggacttatccacatcggtatgcagaactattccggcggccgcgccggtgatccgccgtcgattgccctggcaaaacgcctgcgtgaattgccgctgcgtgtcggccgcctgaaaaccgggaccccgccgcgtatcgacgggcgctctgtggatttttcggtgatgaccgaacaagccggtgatacaccgattccggtgatgtcgttcatggggtccaaagaacagcacccgaaacaggtcagttgctggattacccataccaacgcacgcactcacgaaatcatcgccgcgaacctcgaccgttcgccgatgtattccggggtgatcgagggtattggcccgcgttattgcccatcgatcgaggacaagatccatcgctttgccgacaaggaaagccatcaggtcttcatcgagcccgaaggcttgaccacccacgagctgtacccgaacgggatttccacttccctgccgttcgacgtgcaaatccagattgtgcagtcgattcgcggcatggaaaacgcacacatcgtgcgtccgggctacgccatcgagtacgactacttcgacccgcgtgacctgaagtacagcctggaaaccaaagtgatcggcggtttgttcttcgccgggcaaatcaacggcaccaccggttacgaagaagccggcgcccagggtttgctggccggaaccaacgccgcactgcgtgcccaaggcaaagacagctggtgcccgcgtcgcgacgaggcgtatatcggcgtgttggtcgacgacctgattaccctgggtacccaggaaccgtaccggatgttcacttcccgggcggaataccgcctgattctgcgtgaagacaacgccgacctgcgtctgaccgaaaaaggccgcgagctgggcctggtcgatgacgcgcgttgggaagctttctgcaaaaaacgcgaaagcatcacgctggaagaacagcgcctgaaaagtacttgggttcgcccgggtaccgagcagggcgacgcgattgctgagaagttcggtacgccactgacccacgaatacaatttgctcaacctgctgtcccgtccggaaatcgactacgctggtctggtcgaagtgacaggcggcggcgcagaagatccacaggttgccgaacaggtcgaaatcaagaccaaatacgccggttacattgatcgccagcaggatgagatcgctcgcctgcgcgccagtgaagacaccaagctgcctgtggatatcgattacaccgggatttccgggctgtcgaaagaaattcaaagcaaactggggataactcgcccggaaacgttgggccaggcttcacgtatccccggtgttaccccggcagccatttcgctgttgatgattcatttgaaaaaacgcggcgcgggccgtcagttggagcaaagcgcttgagttcgtctgttacctcgcaacatgccgaagagttatccacaggcgcacgccaattgggcgtcgacctgaccccggcccagcacgaattgctgctgggctacctcgccctgttgatcaaatggaacaaggcttacaacctgacggctgtgcgtgatccggacgaaatggtttcccgtcatttgctcgacagcctgagcgtgatgccctttatcgaaaatggccgctggctcgacgtgggcagtggcggcggcatgcccggcatcccgctggccatcctgtttcccgagtcccaggtcatatgcctggacagcaacggcaagaaaacccgcttcctgacccaggtcaaactcgaactcaagctggataacctgcaagttatccacagtcgcgttgaagagttcacgcctgaacggcctttcaacggaattgtttcccgggcgttcagcagcatggagaacttcagcaactggactcgccacctgggcgaccgcgacacccgctggctggcaatgaagggcgtccatccaagcgatgagctgttagcattgccggcagacttccacctcgatagcgaacacgccttggccgtacccggttgccaaggccaacgccatctgctgatactgcgccgcacggcatgattgggaacacaagcaagaatggctaaggtattcgcgatagcgaaccagaaaggtggcgtgggcaaaaccaccacctgcatcaacctcgcagcatccctggtggctaccaagcgccgggtgctgttgatcgatctcgatccacagggcaacgccaccatgggtagcggtgtggataaacacggcctggaaaactcggtctacgacttgctgattggcgagtgcgacctggctcaggccatgcactactccgagcacggcggttatcaactgctgccggcgaaccgcgatttgactgcggcggaagtggtgctgctggaaatgcagatgaaagaaagccgtctgcgcagcgccctggcgccgatccgcgagaattacgactacattttgatcgactgcccgccgtctctgtcgatgctgacactgaacgcgctggtggctgccgatggggtgattatccccatgcagtgcgagtactacgcactggaaggcttgagcgaccttgtggataacatcaagcgtatcgctgaactgctcaacccgaacctgcagatcgaaggcctgctgcggaccatgttcgatccgcgcctgagcctgatgaacgatgtgtcggcgcagctcaaggaacactttggcgaacaactgtacgacacggtgataccgcgcaacatccgtctggccgaagcgccaagctacggcatgcccgcgctggcgtacgacaagtcatcccgtggtgccattgcctatctggcgctggccggcgagatggttcgccgtcaacgccgtaactctcgcaccgctgcagcccagccaacttaaggaatccccatggccgtcaagaaacgaggtctcggacgtggactggatgcactgttgagtggtccgaccgtcacatcgcttgaagagcaagcggtgcaggccgacgagcgcgagctgcagcacctgccgctggacctgatccagcgcggcaaataccagccacgccgggacatggacccccaggcgctggaagaactggccaattcgatcaaggctcagggcgtgatgcagccgatcgtggttcggcccattggtggcgggcgctttgaaatcatcgcgggtgaacgccgctggcgcgcgagccagcaggccggcaaggaaaccatcccggcgatggtgcgcgatgtgccggatgaaacggccattgccatggcgttgatcgaaaacatccagcgtgaagacctcaatccgatcgaggaagcgatcgcgttgcagcgtttacagcaggaattccagctgacccagcaacaagtggccgaggcggtgggcaaatcccgcgtgactgtatccaacttgctgcgcttgatcgcgttgccggaagtcatcaagaccatgttgtcccacggcgacctggaaatgggccacgcccgtgctttgctcggtttgccggaaaatcaacaggttgaaggggcgcgacacgttgtcgcacgggggctcactgtccgtcagacggaagccttggttcgccaatggctcagcggcaaacctgcaccggtcgaaacggccaaacctgatccggatatcgcacgtcttgagcagcgcctggccgagcggctgggctctgcggtgcaaattcgtcacggcaagaaaggcaaagggcaattggtcatcggatataactcgcttgatgagcttcagggcgtccttgcccacatccgctgaaacatttgcttatgtagcgcgcgatcggaaaacactacccgacagttgaataggggctgaaccgcccctatactctgcgcgcattttgtcggcacaaattatgccaagttattgatttccggcagccgaccattgaggagcaagagtgatggaaacccgcacgccaaacacgttgccgttccatcgcttggccgttttcccggttttattggctcaatttgtcattttgctgatcgccgcattggcgctttggtattggcatggagtcgttgccggatattcaggactctgcggaggcctgatagccttgctgcccaatatgtattttgctcacagggcctttcggttttccggcgcccgagcagcccaggctatcgtccggtctttttatgccggcgaagcagggaaactgattttgacggcagtgctgtttgcactgacctttgcaggtgtgaagccattggcgccgctggctgtattcggcgtcttcgtgttgacccaactggtcagctggttcgctcccctgctaatgaaaacaagactttcgaaaccttagggcgtttgaggcaaccatggcagaaacaaccgcttcgggctatatccagcaccacttgcagaacctgaccttcggtcagcttcctaatggcggctggggctttgcccactccgcagcagaggccaaagaaatgggcttctgggctttccacctggatactctgggctggtcggtcgcattgggtctgatcttcgtcctgattttccgcctggcggcaaagaaggcgacttccggtcaaccaggtgctttgcagaacttcgttgaagtactggtcgaattcgtcgatggcagcgtgaaagacagcttccatggccgtagcccggtgattgcaccgctggcactgaccatcttcgtctgggtgtttctgatgaacgccgtcgacctgatcccggttgactggattcctcagctcgccatggcaatcagcggcgacccgcacattccattccgtgccgtatcgaccactgaccctaacgctaccctgggcatggccctgtcggtctttgcgttgatcattttctacagcatcaagatcaagggcatcggcggcttcatcggcgaactgaccctgcacccgttcggcagcaagaacatcttcgttcaagccctgctgatcccggtgaacttcctgctggaattcgtgaccctgatcgccaagccgatttccctggcgctgcgactgttcggcaacatgtatgccggcgagctggtgttcattctgatcgctgtgatgttcggcagcggcctgctctggcttagcggcctgggcattgttctgcagtgggcgtgggctgtgttccacatcctgatcattaccctgcaggccttcatcttcatgatgctgaccatcgtctacctgtcgatggcgcacgaagagaaccattaagaccagtctcgactagtctgatgtccttcccggtgaaacgggaaggtggcccaacagggctatgaaacgatttgttttaccgctttaaaatctaaaaaacctaaaccatacgacgtaaaagtcgggaggaaagatggaaactgtagttggtctaaccgctatcgctgttgcactgttgatcggcctgggcgccctgggtactgccattggtttcggcctgctgggcggcaagttcctggaaggcgcagcgcgtcagccagaaatggttccaatgctgcaagttaaaatgttcatcgtcgccggcctgctcgacgccgtgaccatgatcggtgttggtatcgctctgttcttcaccttcgcgaaccctttcgttggtcaactcgccggttaatcactcgttttttcgagtgattggtgtgttgtgcaacgaatgagcgaggtattggcgtgaacattaatgcaaccattattggtcagtccttagcgttcttgatttttgtcgttttctgcatgaagttcgtatggcctccggtcatcgcagctctgcacgaacgtcagaagaagattgcggatgggctggacgctgcagcccgagcagctcgcgacctggagttggcccaagagaaagcgggtcatcaactgcgcgacgctaaggcacaggcagctgaaatcattgagcaagccaagaaacgcggtaaccagatcgtcgaagaggctgttgataaagcccgcgtcgaagctgaccgtgtgaaggcttcggctcatgccgagatcgaacaggaactgaacggcgtcaaagacgcgctgcgtgcccaactgggtgctctggcggtcggcggtgctgagaagatcctgggtgccacaatcgatcaaaacgcgcacgcggagctggttaacaaactggctgctgaaatttaagcgagggcgatcatggcagaactgaccacgttggctcgaccttacgctaaggcagccttcgagcacgcccaggcccaccagcaactggcctcttggtcagccatgctcggcctggctgcagcagtgtcgcaagacgacaccatgcagcgcgtgctcaaggccccgcgcctgacgagcgcagataaggccgccacttttattgaagtgtgcggcgacaagtttgatgtgaaagtgcagaacttcatccacgtcgttgccgaaaacgaccgtctcccgctgttgccggagatcgccgctctgttcgacctgtacaaggccgaagaagagaagtcggtagacgttgaagtgaccagtgcttttgcattgaaccaagaacagcaagacaaactcgccaaggttctcagtgcacgactcaatcgggaagtgcgcctgcaagcttcggaggacgcatccctgattggtggtgttgttatccgtgccggcgacctggttatcgatggctcgattcgcggcaaaatcgcgaaacttgccgaagcattgaaatcttgagtttgaaggggcagcagagcaatgcagcaactcaatccttccgaaataagtgaaattatcaagggccgcatcgacaagctcgatgtgacctcccaagcccgtaacgaaggcactgtcgtcagcgtatctgacggcatcgtgcggattcacggtctggccgacgttatgtacggcgagatgatcgagtttccgggcggcgtctacggtatggccctcaacctggagcaagactccgtaggtgccgttgtattgggctcctaccagtctctggccgaaggcatgagcgccaagtgcacaggccgcatcctggaagttccggtaggtaaggaactgctgggccgcgtagtcgatgcactgggtaaccctgttgacggtaaaggtccactgggcaacaccgagaccgacgcggtcgagaaagttgctccaggcgtgatctggcgtaagtcggtagaccagcctgtacagactggctacaaggctgtcgacgccatgatccctgtcggccgtggccagcgtgagctgatcatcggtgaccgtcagatcggtaaaaccgctctggccatcgacgcgatcatcaaccagaaagacagcggcattttctgcgtctacgtagccatcggtcagaagcaatcgaccatcgccaacgtggttcgcaagctggaagaaaacggcgccctggccaacacgatcatcgtggctgccagtgcttcggaatctcctgcgctgcaattcctggcaccgtactccggttgcaccatgggcgaatacttccgcgaccgcggtgaagacgcgctgatcgtttatgacgatctgtccaagcaagcagtggcttaccgccagatttccctgctgctgcgccgtccaccaggccgtgaagcttacccaggcgacgtgttctatctccactcccgtctgctggagcgcgcatcccgcgtatccgaagagtacgtagagaagttcaccaacggcgcagtgaccggcaaaaccggttccctgaccgcactgccgatcatcgaaacccaggctggcgacgtttccgcgttcgttccgaccaacgtgatttccatcaccgacggtcagatcttcctggaatcggccatgttcaactcgggcatccgccctgcagtgaacgccggtgtttcggtatcccgtgtgggtggtgccgctcagaccaagatcatcaagaagctctccggtggtatccgtaccgctctggctcagtaccgtgaactggcggcattcgcccagtttgcgtccgacctggacgaagcgacccgtaagcaacttgagcatggtcagcgcgttaccgagctgatgaagcagaagcaatacgccccaatgtcgatcgctgacatggcgttgtcgctgtatgccgctgagcgtgggttcctgactgacgtcgaaatcaccaaggtcggcagctttgaacaagcgctgattgcttacttcaaccgcgatcacgccgacttgttggccaagatcaacgtgaagggtgacttcaatgacgaaatcgacgctggcatgaaagccggtatcgagaagttcaaggccacccaaacctggtaagccgcagcgggagccgcaaggctcccgcttgctaacctgataggtgttacatggcaggcgcaaaagagattcgcagtaagattgcgagcatcaaaagcacgcaaaagattaccagcgccatggaaaaagtggcggtcagcaaaatgcgcaaggcacaaatgcgcatggctgctagccgtccttatgcggagcgtatccgccaggtaattgggcatttggccaacgccaacccggaataccgccaccccttcatgatcgaccgcgaagttaagcgtgtgggttatgtggtagtgagcagtgaccgtggtttgtgcggtggtttgaataccaacctgttcaaggccctggtcaaggacatggcggtaaaccgcgaaaagggcgtcgagatcgatctgtgtgttgttggtagcaagggtgcggcctttttccgtaacttcggcggtaacgtcgtagctgctatcagccacctgggtgaagagccgtcgatcaatgatttgatcggcagtgtgaaggtgatgctggatgcgtacctggaaggccggattgaccgcctttccgtggtatccaacaagttcatcaacaccatgacccagcagccaaccgtggagcaattgattccactggtggcgactccggatcaggaactcaagcaccactgggactacctctacgaaccagacgccaaagagctgcttgacggcttgatggtgcgctacgtggagtcgcaggtgtaccaggcggtggtcgagaacaacgcagctgaacaagcggcgcggatgatcgcgatgaaaaacgctaccgataacgccggtgatctgatcagcgatttgcagctgatctacaacaaggcgcgtcaggctgcgatcacccaagagatctcggaaatcgtcggcggcgctgccgcggtttaacggttcaaatattcagaggatccagctatgagtagcggacgtatcgttcaaatcatcggcgccgttatcgacgtggaatttccacgcgacagcgtaccgagcatctacaacgcgctgaaagtacaaggcgcggaaactactctggaagttcagcagcagctgggcgacggcgtagttcgtaccattgcgatgggttccaccgaaggcttgaagcgcggtctggacgttatcgactctggcgctgccatctccgtaccggtcggtaaagcgaccctgggccggatcatggacgtactgggcaacccgattgacgaagctggcccgatcgacaccgaagagcgctggggcattcaccgtccagcaccttcgttcgccgaacaagcgggcggcaacgacctgctggaaaccggcatcaaggttatcgacctggtttgcccgttcgccaagggcggtaaagtcggtctgttcggtggtgccggtgtaggcaaaaccgtaaacatgatggaactgatccgtaacatcgccatcgagcacagcggttattccgtgttcgccggtgtgggtgagcgtacccgtgagggtaacgacttctaccacgagatgaaggactccaacgttctggacaaagtggcactggtttacggtcagatgaacgagccgccgggtaaccgtctgcgcgtagcactgactggcctgaccatggccgagaagttccgtgacgaaggtaacgacgttctgctgttcgtcgacaatatctaccgttacaccctggccggtactgaagtatccgcactgctgggccgtatgccttcggcagtaggttaccagccgaccctggctgaagagatgggcgttctgcaagaacgtatcacttcgaccaaagaaggttcgatcacctcgatccaagcggtatacgtacctgcggatgacttgactgacccgtcgcctgcgaccaccttcgcccacttggacgctaccgtcgttctgtcccgtgacatcgcttccctgggtatctacccagcggtcgatccactcgactcgacttcgcgccagctggacccgaacgtgatcggccaggagcactacgacaccgctcgcggcgttcagtacgtgctgcagcgttacaaagaactgaaggacatcattgcgatcctgggtatggacgagctgtcggaagccgacaagcagttggtaaaccgtgctcgtaagatccagcgcttcttgtcgcagccgttcttcgtggctgaagtcttcaccggtgcttcgggtaaatacgtttccctgaaagacaccattgctggcttcaaaggcatcctcaacggtgactacgaccacctgccagaacaagcgttctacatggtcggcggcatcgaagaagcgatcgagaaagccaagaaactgtaatcccggcgcccggcaacgggcgctcatcaggttgaggcaatcagatggctatgacagtccattgcgatatcgtcagcgcggaaggggaaatcttctccggtctggtagagatggtgattgcacacggcgaattgggtgaccttggtattgccatgggccacgcaccgctgatcaccagcttgaagccaggtccgatcactctgaccaagcaaggcggggacaaggaggtgttttacatctccggtggtttcctcgaggttcagccgaacatggtcaaggtacttgccgacaccgtgcaacgtgctggcgacctggatgaagcctccgctcaggaagccgtcaaggctgccgagaaggccctgaacgaaaagggtgcggacttcgactacagcgctgctgctgtacgtctggccgaggctgcagcccagctgcgcacgctccagcagatccgcaagaagtaagcggccatgccgtcacgcttcatgcgcgattgattaaaaagggtagcctcggctaccctttttctttttttgcaaaacacttctttggtctgaagtcggaccgcccaggattggtagccattcatgtctctcgaaatcgtcattctcgccgctggccagggcactcgcatgcgttcggccttgcccaaggtgctgcacccggtcgcgggcaattccatgctcggccatgttatccacagcgctcggcaactggacccgcaacgtatccacgtggtgattggccacggtgccgatgcggtgcgtgagcgcctggcggcagatgacctgaatttcgtattgcaagacaagcaactgggtaccggtcacgccactgcgcaagccgtgcccttcatcagcgccgataccgtactgatcctctacggcgacgtgccgctgattgaagttgaaactttgcagcgcctgctcaagcacgtggtacctggccagatgggcctgctcaccgttgagctggatgaccctaccggctacgggcgcattgtgcgcaatgctgacggcaaggttgccgccatcgtcgaacacaaagacgccagcgaagcccagcgcgccatcaccgaaggcaacaccggaatcatggcggtgcctgccaacaagctcgctgactggatgagccgcctgtccaacaacaacgcccagggcgagtactacctcactgacgtcatcgagatggccgtgagtgacggcctgctggtcgccaccgaacaacctcacgacccgatggaagtgcagggcgccaacgaccgcaagcagcttgcagaacttgagcgtcactaccaattgcgcgaaggccgtcggctgatggcccaaggcgtgaccttgcgcgacccggcgcgtttcgatgtgcgtggcgaggtgaccgtaggccgcgacgtgctgatcgatatcaacgtgattctcgaaggccgcgtgatcatcgaagacgacgtggtgattggcccgaactgtgtgatcaaggacagcaccctgcgcaaaggcgtggtggtcaaggccaacagtcatctggacggcgcggtgatgggcgagggcagcgatgccggtccgtttgcgcggttgcgtccggggagcgtgctgggggccagggtccatgtgggtaactttgtcgaactgaagaatgccaacctgggcgagggggctaaggccggtcatctgacgtacctgggcgacgctgtggtcggtgcgcgcaccaacatcggcgcgggcaccatcacgtgcaactacgatggcgccaacaaacacgtcaccgtattgggcgaagacgtattcatcggctcgaacaactcgttggtcgctccggtaaacgtgggcgatggagccaccacggcggccggttccaccatcaatcaggatgtggataacttgcaactcggcgtagcccgtgcccgccagcgcaacatcgacggctggaaacgcccggtcaaaatcaaaaagtcctgagttatccacagctcaattggcgggcgcggttcccctgtgggagctggcttgcctgcgatagcggagtgtcagacgacatcaatgttgaatgtcaggccgcaatcgcaggcaagccagctcccacatttgatttctgacgaccaaaaaatttgctcgccccgcttgacgatctttcgccaataggttttgattgccttcgttatctttcgaaacgaaacttatcatcaccatgtcgaaacgaaatacaccccagcgacgccacaacattctgaccttgctcaccgaacagggcgaagtcagcgtggacgaattggccaagcgtttcgaaacctcggaagtgaccatccgcaaggacctggccgccctcgaaagcaacgggctgttgttgcgtcgctacggcggcgcaatcaccatgccgcaggaattggtcggcgacgccgctcaacccatctcggcctacaagcgcgctatcgcccgtgccgccgtgatgcgcttgcgcgaacacgcccggatcatcatcgacagcggcagcaccaccgccgcgatgattcccgagttgggccaccagcccggcctggtggtgatgaccaactccctgcacgttgcccgtgccttgaacgaactggaacacgagccggtgctgttgatgaccggcggcacctgggacccccactcggactcgttccagggccaggtcgccgagcaagtgctgcgttcctacgacttcgaccagttgtttatcggcgccgatggcattgatctggaacgtggcaccaccaccttcaacgaattgctcggcctgagccgcgtaatggccgatgtcgcccgtgaagtcgtggtgatggtcgaatccgacaagatcggccgcaagattcccaacctggaactgccctggagcagcgtccatacccttattaccgatgatcgcctgccgcttgaggcccgcgaccagatccaagcccgcggcattacgctgatatgcgcggcaatcatctaggagaaacaccatgtgtggaattgttggcgcagtcgctgaacgtaacgtcaccgccattttgctcgaaggcctcaagcgcctggaataccgtggctatgacagcgcaggtgtggcggttttctccaacgccggcaagcttgagcgcatgcgccgcccgggcaaagttgccgagctggagcaagccctgctcggtgagccactggttggccgcctcggcatcgcccacacccgttgggcgacccacggtgcgccgtgcgagcgtaacgcccacccgcatttctccggtgacctggccgtggtacacaacggcatcatcgaaaaccacgaagtgctgcgcgaacagctcaaaggcctgggttacgtgttcacctcggacaccgacaccgaagtcatcgctcacctgctgaaccacaagctcaaggacttgggcgacctgaccgtcgctctgaaggccaccgtcaaggaactgcacggcgcctacggcctggccgtggtcagcgccagccagcccgaccgcgtcgtggccgcccgcagtggcagcccgctggtgattggcctgggcctgggcgaaaacttcctcgcctccgaccagttggccctgcgtcaggtcactgaccgcttcatgtacctggaagaaggcgatatcgccgacattcgccgtgaaagcgtgcaaatctgggacgtcgacggcaactccgtggagcgcgaagccgtgcaataccgcgacggtgccgaagccgccgacaaaggcgaattccgccacttcatgctcaaggaaatccacgagcaacccaccgtcgtgcaacgcaccctggaaggccgcctgagccagaaccaagtgctggtcaacgccttcggcccgcaagctgccgaattgttcgccaaagtgcgcaacgtgcagatcgtcgcctgcggcaccagctaccacgccggtatggttgcccgttactggctggaagaactggccggcattccgtgccaggtcgaagtcgccagcgaattccgctaccgcaaggtggtggtgcagcccgacaccctgtttgtgaccatctcccagtccggcgaaactgccgacaccctggcagccttgcgtaacgccaaggagctgggcttcctcggcagcctggccatctgcaacgtcagcatcagctcgctggtgcgtgagtccgacctgaccctgctcacccaggcgggtcgcgaaatcggcgttgcttccaccaaagccttcactacccagctggtcagcctgctgctgctgaccctgtccctgggccaagtgcgcggcaccctcgccgagggcgtggaagccacgctggtggaagaactgcgccgcctgccaacccgcctgggcgaagcgttggccatggacagcaccgtggaaaaagtcgccgaactgttcgccgacaaaaaccacaccctgttcctcggccgtggcgcgcaatacccagtggcgatggaaggctcgctcaagctcaaggaaatctcgtacatccacgccgaagcctacccggccggcgagctgaagcacggcccattggcgttggtggatgacgacatgcccgtggtgaccgttgcaccgaacaatgaactgctggagaagctcaagtccaacctgcaggaagtgcgcgcccgtggtggccaactgatcgtgttcgctgacgaaaaggccggcatgaccaatggtgaaggcacccacgtcatcaacatgccgcacatccacgacaccctgtcgccaatcctctacaccatcccgctgcagttgctgtcgtactacgtcgccgtgctcaaaggcactgacgtcgaccagccgcgcaacctggcgaagtcggtaacggtggagtaaaccgcatgaatcggctggctgccatggaagccttggtgcgcgtcatcgaaaccggttcgttttccggcgcggcgcgacagcttcacgtgggccagccagcgatttcaaaatccatcgcccagctcgaagaacggctgggtgtgcggctgctcctgcgctccacccatggcctgacgcccaccgaggcggggcagagcttctatgaacacgccaagcgttcgattgatgaggctgacgaggcggacatggcggctcgcggggctggggctacgttatccgggcgcctgcggatctgcgccgctgtgacctttgcaaggctgcacatcgttcctcacctcgggcaattccttgcggaacacccgtcgctggacgttgaagtggtactggatgatcgcaacgtcgacctcatcgaagcgggcatcgacgtggcgcttcggatgggcgacctggtcgactccagcctgaccgccagaaaaatcgctcagggccgccgtcttgtgctgggtacaccggcttatttcgaagcggctggcgaaccgcaaacacccgctgacctcacttcccatcaaaccgtggtctacgaccaacggggtggtggcgcggtgtgggcattccagcaagattcggtgaaaaccaacgtgaccgtccgtggacgcctgcgcatcagcgctgccgagggcattcgcgaggctgtcctggcgggcctgggtctgaccatctcttcggaatggatgtttgcacccgagctacaggccggcgccgtgaaatccgtgctgcaagactggacgctgccacctatcgacttgtgggccgtgttccccaccggtcgccaggccagcgccaaggcgcgggcttttgtggcgttcgttgaatcgcgaatggcgcaaacaccccggcaggtttaatccctctctcaaggccaagctattccggcgtggaataaccttaatgcttggccaccctctacaaggcatgcgcctccctcagtacctttgagtccttggcccgtcactcacgggcactcaacgggtggagcactgcatggccaggctaaaaggcaaagtcgccgtcattacgggcggcaacagcggtatcgggctggcgacggccaaacgtttcgttgatgaaggcgccagcgttttcatcttcggtcgccgtcaaaccgaattggacaaagccgttgcattgatcggcggtgatatcactgcggtccagggcgacgtgtctgaaccgagcgaccttgaccggctctacgccacggtcgagcaagccaagggcaagttcgacgtgctcttcgccaacgctggcgtggtggagcttcgtccgctggatgaattttccgtcgagcatttcgacaagaccttcgatgtgaatgtacgcggcctcgccctcaccgtgcaaaaagcgttgccgctgttgcgcgatggcgcgagcgtcatcctcaccggctcgattgcgggcgttaaaggctacccaacctatggcacctacagtgccagcaaggcggcggtgcgctccttcgcacgcacttggacgatggagctgaaggaccgtggcattcgggtcaacaccatcagcccgggggccatcgacacgccgatcatggacagccaggtctcaacccctgaagaagctgacgcgctgcgtattcaattcgcacaagtcaccccgctcggccgcctcggccagccggaagaagtggcctcggtggcgctgttcctcgcctcagaagacagcagttttgtggccggcgtcgacctgttcgtcgacggcggcatcgctcaagtctagacaccgcccctcacacacacggaacccatcatgaccaaactattcagctctacccaagtcggcaccctcaacctggcgcaccgcgtcgtgctcgcgccgctcacccgcctgcgcaccgaagccggcgatgtgcccggcgatttaatggtcgagtactacacccagcgcgccaccaaaggcggattgctgatcgccgaagccaccagcgtgtcgccgatgggcatcgcctatgcactcgcgcccggtatctacaccgacgcgcaggtggccggttggaagcgtgtgaccgacgccgtgcacgccaagggcggcagcatttatctgcaagtctggcatggcggccgccaggcacacccaggcaacctggacggtgcattaccggtcgcaccttcggccattcgcggcgaagaaaaatcggtggtacgcgacggcgacagcatcgcagaggttgaccaagtggtgccgcgagccctgaaaatcgaagaaattccgggcatcatcgaagaattccggcgcggggcagagcgcgccaaggctgccggttttgacggcgtggagctgcatggcgccaacggctacttgccagaccagttcctgcaagacgggtccaaccatcgcgacgacgcttacggcggcccggtcgagaaccgcgcgcggttcatgctcgaagccgtcgaggcgctggtctcggtgtggggcggcaatcgtgtggcagtacgcatttcacccagtggccagttcggcaccatgtcggacagcaacccggcggcgaccttcggctatctggccaaagagctgaaccgcttcggcctggcttacttgcacgtcatcgagccgcgcatccgcggttacgaggacatcgagctgaacgtgccggccgtggcgtccaaaagcctgcgtggcatcttcaaggggccgatcctggccgccggcgggttcacccgggaaactgctgaagaaatcatcacggcgggtgatgcagacttggttgcgttcggccgactcttcatctccaacccagacctgccggagcgcctgcgcacgggcgcccccctcaatgattacgaccgcaacacgttctacggcggtcgtggcgaaggctatatcgattacagcttccttgatgaagccgttgcctgattgatgtaattagcccggtcaggctcgcgcaatacctgtggtgagggagcaagctccctcgccacaatgttgcgtaaccgaagcttcacgaaataaatcggctcttccaggtgttcccttgggacagcgcgcaactgcgcgggtagttctagccccctggaagacgatcatgctgacctgtttcgagcccgttcaagccccatccccctcgcaaacgccgctgcacgcgctgtttcagcacgccgccgaacgtcccaatgccatcgcgctgatcgccgacggtgacgtctggtcctatcaccgcttggccaatgaagtggtgcggctgagcaatggcttcaaacacgcgggcgtcgagccaggtgatcgcattgtcatgctggtgcgcacgtcgccgttgtacgcagtgtttctgttcgccgcgatgatgagcggggcgatcatggtgccgctcaagactgaattcactgcccgtgaactggatgaattcctcggctggttgcggccgaaactgtttatccacgaggcggatttgcagacggtgatttcacagatggacgccgatgttctcgcgcgtacacgcaccttcacccgcacaggctgggacgctctgctgggcgacggcagccgtcagaccgcaaaagtacccgtcgacatcgattcaacctgcctgctgctggcgacgtccggcaccaccggcatgcccaaattggtggcctacaaccagcgcgcgatttcccacgtggccggtgccctggaggcgtggaagctcgactcgggctcctgcacccttggcagtacgccggtggcccatgtctccggctctttcgtgctgctcgcgacgattatcaaaggctgccgtgaagtgatgttcagccggttcgacgccgacaagctgctcgacgccatcgagcaggagggcggcagcatgctgtttgtcgcgcccttcatctgccagcccttggtggacgctcaacgtaaacgaccgcgcgacctcagctcgctgcaagtctgcgggatcggcggcgacgcctgccggccgccagtggctgaaaccttccaaagcaccttcgcgtttcggctgaacaacacctacggtctgaccgaatgcctgggcagcatggcgttcggttcggcctgggacaccctcaccgccgtgcccgggcgcgcacgcctggtgggcaccgatggcgtaatcgtcaggcaaggcgaagtgggtgaactgcagatgtgcggcccgaacctcagcctcggctactggaccggccccggcgacatcatcagccacagccgtgaaggctggttttcttccggcgacctgatggtgcaagagcccaatggcgaataccgcttcgtcggccgctgcaaagaccagatcgtcagcttcaccgacaaaatctccccggtggaagtggaaaaccaattgatcctgcacccggccgtggctgatgccgctgtagcaggcgcgccggattgcgcagcggggcagcgcgtggtggtgctggtcaagcgggcgcctgatgcaacggcaacggccgatgagattctcgcctggctgggcgaacgcctggcgccgttcaagctgccgcagcagatcgtgctgaacgatgtcatcccacgcaacgcgctgggcaaagtagaccgcaatgaggtggtgcgaatcgtatcgctgaattaacgacctctcgtcgaaactgtgggccactgccgggcgaggagcccggctttacccctagaatgcctccctgtggataacttcagccagggacgccttcaccatgaacatagaactgcttattgccggtatcgtcgtggtcatcatcgtcgtcggcctggtgggctggatggttggcgtctacaacggcctggtaatgcggcgtaacgatgtggataaagccttcgccaacatcgatgtgctgctcaaacaacgcgctgatcaaatccccgacctgatgcgcgtggtgcaaaccgcgatgaaccatgaaaacgcgctgttcactcgcctgagtgacgcgcgcacgcagtacctcaacgccagcagcctcaacgataaggttgaggcgtccaaccagctcaatgcggcgctcaagtcggtgatagcggtggcggagaattaccccacgctgatttcggggccaaacatggtcgagttgcagcacgccatctcggcagtggaggaacgcattgctgaccggcgtgagtttttcaatgaatcggtaaacctctacaacatcgccattgcggtgtttcccgacctgtttttcgcgcggatgctcagctatcagcgcatcccgttgttggccatcagcgccgacgaaacccgctacgacggcgtgaagcttgaggtgccgggcgcatgaaaaccacccaggcgggcgttgcggtgaaaaagcccaagtggaaaaccctgctggggctggtgttcctcgccggttttatcgccttgatggtgtacgcgccgaacatcctgatcgcgctgtttttcccgatgtttattctgatcggcctgctggtcagcttcggtcccaacttctacaaaaccgagcagcgccttgctaccagccagattcgctcgctggccatggggctggtggaagtgcgcggcaaggtcattgccgacaagacgatgctgtcgccggtgctgggtaagccgtgtgtgggttacgtgtggattgtcgagcaaggcacgaaagacaaggacggcgactggagctggagccgggtgtcgggcgatgcgtgctgcaacgacttccggctgcgcgatgcgagcggtgaggtcggtgtgattgccgagggcatcgacctgttcggcaacaaatcacctgacgaatacgagctgattggcagttcacggcgccagggcgaaatcctgctcgtccaagacctggacgtgatgctgatcggcgatgcctgcgagcaggctggccaaacagtgatcgcccaaggcaagcacccgaaggccgtgtttggcgtggcgctgaccgaggacgtggaaaaccgccgggtgctggcgccgttgtggcgcgccggtggcttctatggcgcggtggtgggcctgctgggggttggcatcatggccatgacccccgcgcacttcgcccaactgcatttgcccggccccgagacgtatcaacagatggccgggcagggcccgctgtatcaattgctcgcctggctgtaccgcgaaggcggcttcccgattcccttcatggccgcgttcgggtttttcctgacgctgatcgtggtgatcatggcgacccggctcgtactgcccaagggcatgcgcatcgccgtggcccgcgtgttgggagcgtggaccgggttgggcatggtcatcggcggcgtggtgacgctgctgttgttcgtcgcccatgtggatgtcatgaagctgtttctggtgtggatgctgatcctgctcggcaccctggtgttctcgctgtttgagcaacgcaagatgggcgtggcctatcagcattttgccaaacgggtgggcaaaggcagcttcagcgacgaagacgcctgatcagggcacaaactccactttcaacccacggctggtgctgcgcccctgatcatcactgacccgcaggcggtattctcccgacttgcccggccgccagttcagtgtggtttgcggcgggccctggccgatcagggtctggtcggcaaaccagtacagcgtggcggcatcgctggccgcgctggcattcagcgggatgctgtcctgtggctgggacaggcgcagctgatagctcacctgggttagcggcgagcggatctgcggcgcttcgcttgtgtcgctgatgcgattgggctggcagtttttcatcacagtgggcggcgtgcgtcgcggcaggcctgcggcgcgatacagccgttgcacatcactgggccagaactcgaagacttcttcacgggtgtattgcgcctcgaacggcgggcacgctgccttgcccgtgcgggtgtcgatcagcaccgggcggtgcaggttggacacgcgaatcggtgacaccccggggatgtaccaggtcttgcgggtttgcgggcaccagcggttgggcaactcaccggaggcggcgcacacgtcaatgcgcaccagcccggcgggcggtttgtcgggcttgagcaccacgttgggcaaggccaggggcagggcgtcggcgatgcggaaaaacagcggtgcggcggtcttggcgccgatgaacgccgggtttggccggccatcgaagttacccacccacaccaccagcacatacgggccgaccaagcctgcgctccacgcatcgtgaaaaccccacgaggtgccggttttccatgccgtgcgccagtgtcggccgggtaaaccgtccgggcgtggattgcgccgcagcatgtcgcgcaccataaacgcggcttgcggtgtgagcagttgcgcgccagtggcctgcggctgttcctgcacatagcgcaacggccgcaaatgcccatcacctgccagcatcacgtacagccgcgccagttcttccggcgtcatttcgccgccaccgagggccagggccaggccgtaatggctttcatcgcgcaggcccttgatgccggcgcgctgcagcaggccatataaagacggtgatttgacctggctggccagccacaccgccgggatattgcgactacggatcaacgcgtcccgcgccgtcagcggcccgacaaaactgccgtcgaaattttccggctggaagtagccgaagttactcggcaaatccttgaggatgctcatcgggtgaatcacgccctggtccagcgccagcccatacaggaacggcttgagcgtcgagcccggcgagcgccgcgacaacacgccgttgacctggccgtgaatgcttgtggataagtagtccgccgagcccaccagtgccttcacgctctggtcgcggctgtcgatcagaatggccgtggcattttccacgccggtactgcgccgttcggcgataaagccgctgatcaggcgctcgagcaattgctgcaacggcagattcagcgtgctgttgatttcattgccgtccagggacgccaacagttgttcgctcaggtgcggtgccagaaacgggatttgctggcggttgcgggcttcgaggggcaagtccagcaagctgtcgttacgcgggtcctgtggataagtgtcgcgccagtccgccatcaagcgcagccgcgcgtgttgcagcgatggcccgaaacgcgcgcgccgccccggctgctgcggaatcactgccagcgccagcgcttcggacaatgacaactgcgccgccgacttgccaaagtagatgcggctggccgcctcggcgccttcgatattgccgcccatgggcgccaggttcaggtaggcctcaaggatgtcgtgcttgctgtaacgcgcctccagccacagcgccaaggccatctgctgtaacttgcccggcacttggcgcgtgttcagatcccaaaggcgccgcgccagttgcatgctcaaggtcgagccgccctgacgctggccgccactgtaagtggccatggccgcgcgcagcaacgccgggggattgatccccgggtgccagtagaaattgcggtcttccttgagcagcaaggcctcgaccaatgacggtgacatacgctccagcggtagccaaagccggtattggccgtcgtccgccagcgtcatgcgcaacagcgaaccgttgtcggccagtaccacccgcgacgaggtcaccgcttgctccagcggggcatgcggccaaagccgcagccccgccaacagcaccgccgcagccagcagcggcgtcaggcgtttaaggcttggtaatttcaagttggcctactttgccgcgcccttgcagggtggtttcgtacatgccctcggcgtaggccggtggcgtgttgaaagtgcctgcgttggtggcgcgcacgcggtaaacgaaagtgcctacgtcacgcagtgcagtgccgtacaacaccacccggtcatcgcgtacatccacgtagtccggctgccagttgttcaactcggtttcgccgatcggtgcttgccaggtgtcggcctcttcgtcgtctgcggtttccacatactcggaatcctcaccttcactttcctcggtgctggcggcttccggttccggcggcaagttatacacaggctcgacgccgcccggcagcaagtcgaccacggccacttgttgcacctggtcacggtcggtggcgcgcaggcgcaagcgcaccaggaactcatcgcccaccgcgactttgctcacgggctcgcccttgaggtcaaggtactcgtggatgatctccaggccattggtgatcggcttgagcttggcgcccttgtcgaaaccggcttcgctgagcatgtagaacgcggccgggccgtcggttttctccattaccagcttctgcgtagcgcccggtacggcggcgcgcggtggctgaccggccatttccagcaattgctgttgtttgtcgcccagccaggcggtggccttgagggtcatgtcgctctgcgtgcgctggccatagttgtcgagggcgcgcagcaacagggccgccgacagcgagttgtaacgctgttcgttgaggcgcttgccgagtttatccagcagtgccgtcggcacatcgtccagcagctcggggaagtgacgcgcgagcaggtgaaggtgctcggcatcgtgcaccagcgggtcgtaatacaggccgtcgctgtcccacttatccacaagcgagcgccacgggactttgcggaacagtgcatccgcctggcgatcctgcttgagcagcttgtagctggccgccaggtacgcggcgcccagatcgttctgccacgtgtctttggagtacgtctcgtagcgctcgcggatatcgctcaaggcgccgctcaccagaatcccctgacggctgagcaggtagctggcgtacgcgcggttgcgtaattccgacagaccttcgctcgggccgttggccaggtccgtcagataagcattcgagcgcaccaacaggtcttccggcaccggcagcccgcgctccttggcttcgatcaggaagtcggtggcgtacaggctggcgtacggcgccacatccgggttggccgcccacaagccaaagccgccggccccgttctgacgctggcgcagcatgcgtactgcactgctgaaggtgtgttcggcttcgggcgcgttgccgccccagatcaacgccggcatggccttggacaccaactgctcggtgcaggcgtagccgtagtcatccaggtaatgcttgagaccgttggcccacaccagcggcgaggcggcgacgcccaattgcacgtcgcgcagttggctgaacagctcgcgagtgggtttgagctctttgctggcgctgtcgaaacggcccaggctcaaggccacgcggtgctcgctcagcgggcggatcgaggtggtttcggccacctggatgcgcttgccgtccggcagcaccgcgacaaagcgcaggtccgccgagccgagggtgtcacccaccttgatcttgaactcggcggtgccttccttgcgcggttgcagcgacagcgtgctgcccttgtcgccctgtacgagcagcccggcgctggtctgcagttcaaacttcacgtcggcggcggcgtcgaggttgctgaacaccccggcgctgacgctgaacacatcccccggcgccacaaaggccggcacgtttggcgtgatcacaatcggcccgcgcacctcagtgttggcctcgctcacgccgacactgtcggcatccaccgccaccgcaaacaggtgcagcttgccgttgaagctgtccggcacctggtaatgcagcacggtttcaccagcgggcaggtcgactaacccggaccaccaggccaccggcggctggtgtttacgcttgaacgggttcaggtggttggccaaggcgccttccgtatcaccaccgggtgctgccccactgagcaggcggctgaattccggcaggatcaggtcaagaatctgactggtgccgacctccagcgcacgcttctggaagaagaagcccaacgggtccggcgcctggtagcgcgccacttgcaggatgccttcgtccactgcgtacaccaccgcgcggcccgggcggtcggcggtgaccttgatgtccagcgtctgccccggctcgatcttcgccgggccttcaaccttcaacgccatgcgccgcgcgtccaggttgatgctgaatggcaccacgccgtaagacagcgggctcatgtacacctcggccgagcccatatcgcgcacaaactgcacgttgacgtaggcattgccctcaagcccggccggcacgcgaatgtgttgcacgctgttggtgctgtcggccttgaaccactgctgggtgtagaccttgtcacgctcgatagtgatcaagcctgcgccggtataaggcgcgcgaatgctgatcgcaatttcgtcgcccgtggcgtagctgcgtttatccaggcgcaattgcagttcggcgttgcgctccagtgagcgcgaggtgttgccacggccggccacgctgtagtcgatctggttgagcaaattgccgttggcgtccttgagttgcagggtgaaatcccccggcgtgccggtgttcagggcctgtttggcaccttctttggtcatcgccaacggtgaggcgggctgactgatgttcttgatgcgcgactcatatttgtaggtgccgttggactgcttcaccaacaccgacacataacgatgttcaaccacctcagtggtcaggccgtccaccgccacaggtgaaaggtccggcgccacggccagccattgcacctggcgcggcgcatccttggcgacgtatgacagcgaatcctggcttttcacaccgacgaggtaaggtgcggacgacaccagcaaggcactttgcgccgccacgttgcgcccgccctcggcttcgaacacctgggtcatcacttgcaggcggtaggtgctgttggcgaagcgctgcaggttgaggtcgagcacggcctggccgttgtcgtccaccgtggtttcggccaggtcttcggtgctggcttcttccagggaatcggcgaggcggaaacggtaatccgggtaacgctcgaatgccgcgagcgtcgggctcagggacattttcgcggtgacgcgccggcccgacgccggggcgccgaacaagtgcatggcggtgaccttcgccaccacctgatccggtggaatccagccctgcacaggggtgtcgtgcaggctcaggctgactttcatgcggtccggctcaaagtcgcggaccttgaagttgacgctgcccagatcggtgcgggtttgtttctcgtcgatcaactgcaaggtcgcggtgtaatccccggcgggggcgacttcgctgctggggaaatcaaaggtttcaaaaccgctggcggacagcttcagcggctggcgaatcacttccagaccacgcgggtcggtgatttgcagctccaccggcaggccttgcagtgcgcctttccagttgccgctgcgcacgatcatgcccaagtgcgcggtctcgccagggcggtatagcccgcggtcggtgaacagatacgcgctgaggcgatcaatcgcgccgtcctcttccaaaccgcctacatcaaagcgcgaaaaatccagctgctgggagcggcgggcaatgggcaggaacgattggtcattgccgcgcgtgactacgtacatcagcggcgttttctcacgacgcagttcgtccagcttggcgaaatgtgcgtgaccttcggcatccgtgcggccgctgctgaccggcaaaccgttgcggccaatgatgtcgacctgggcgtcggataccggtgaaccgttgccgatggactgcacatacacatcatggctgccatcgctggagcgtttggcgatgatgcccaggtccgtcaccacgatgaaacgcaggtcgctggtgctgctgcggtcgtactcgaacgtgcgctcagccgggtcatcctgggggctgagcttgagcacgaaaatgccgcgccgtccgccgttggcggtgaggtagtggctcaggtcaacgttgtcatagacggttttcgccgggtcattcgacgacagcggaatatccaaagactggcgctcaaccatgcggtcgaaatattcattgcctaagttcggccgggcaaagctgccgctgctttggtccaccagatgttgcaactggttgggcagcaagcgggcaatttccacatgggcacccggcacgccacgggccatgaaacccaggcgtttttcgccgttaaggctgagcaacgcgccgtcagacaggaactgcaaggtgcgcgggtaggccggcatgctgatcaaggacgccgtaggattcttcgccaggtagccgccaatggcttccaggttagccggcacgcgcacgtacagcgcacggcctgccggtgccttgaatttaaaggcgtgcagggtgttcagcggttcgacgctgggcacgtgggtcagcgtgaccttggtgctgcgggcgagcagggcgtcatcaatgtcgttgctggtgtaggggcgtgtgtcgtcctgggctttttccggcagcagccaggcctggaccttaccggcgatggtctcatcggctacagcgctggagctgctgaacaacagcaccggctccggctcgccacgttcgttgtcggcaaaactcacttcggcggcggtgaaggtcaggcgataacggccgggcacggtgacttccgacaccagcggcgctgtgctggcgttgccgccgtcgcgggccttgatgccttcgtcgagtttggcgctgaccggcgtgctttccagcggcgtggccaaggcagcggagcgcacgtaggcgttgagttttttctcgtcgaaggtgatttcggggcggtttggcagttgcgcgtcgcggtaaaccaggcctttgccgagggttacggtgacgcgtttgcgcaggttttcttcatccaccgggtgggaaaagtggaaggtcgccaccagctgtttcagcgtcgggttggacgggtcctgatacagctcgttttgcgccagggtggcgcggaacggctgggtggaaaactggctgctgtactggccgagcaacacgccgtcggccagcaggtttttcttggcgaggtcgagggtgtaatgggcgtcaatgggccagtctttttccggcacgaactgcaaggtgcggtcatcagaccagcgccaggttccggctacgctcggtttgagcgtaatgccttcggtcaccggcttgccaatcgcggccagcggggccacggattcggcgaagcgcacctgcaggttatccacaaccgggggttgttgggtgtagtcggtcaggttcggtttgtgcagcgaatagccaacggtgtggggctgcggcaggtgggaataccactgccagccgtagaagcccgcagcggccagcaacaccaggcccaatacaccggcgcccgcctggcgtggataagcgcgagctttacgccccaggttcgccaggccatggccgatggcacgcagccaggacggcggctgccattggccgaagacggccctcaccacagtcaataacgcaccggcaacacggcggctgatcgctttcaacgaatcgaacatggtgagcatccctggctaagtgcggcgtatcttacacgcgtctttgatacaaaagatgacgtggatacaccgacccgatcaggcgtgctgcacaaaggtgaggcgtactgcaaaaccgatcaaaaggctgccgaacaaccactgctgcacgcgctgcgccgagcgattgcgcgccagccattggccgatgcgcgcgccggccagggcgtagcagcagtcgaacataaagccgaacgtcaccaacaccgcgccgagcagtgcgaactgcgccgcgaccggtccggactgcgggttgatgaactgcggtagcagtaccgagcagaacagcagcgccttggggttgagcaggtttgtgagcaagccacgctggaatgctgcgcgccaggcgtgggccgttgcggtggtattcgtcgagtcgaggtcgggcagcatgttggcccgcaggcactgcacgcccagccacaacaaataggccgcgccgcccaggcgcaccacatcaaatgtccacggtgcgaccttgaacagcgtcgctaaacccatgccggccaacatgacatggcacgctcgggccagccccaggcctatcgctgtggtcagtgccagtgccttgccctgacgcgcgccggtttgcagcagcaggatcatgtcgggccccggcagcaggtacaccaccgaaagcgccactagaaataaccagagttccgccatgtttcacccccttcaaatgttggctaattctagggttgaagggcggggcaggtgcttgcgtagtcagccagaaaagcgtctagtcttggcactatctgccaatcattatcataacggccattcacttatgccaaatcttaaacttgatgcctttgaccgcaagattcttgaagccctgcaacgggatggccgcttgagcaatgtgcagctggcggatgagatcggcctgtctgcttcaccttgcctgcgccgcgtgcgcctgctcgaagaggccggggtgattcgcggctatcaggccacgttggatcgcgacgaagtgggcctggggatgatggtgtttgtgggcgtgaaagtggagcggcataacgacaccgaggccaacgcctttcgcgaagcggtgacggcgctgcccgaggtgatctcggcgtttctggtgtcgggggaatcggatttcctgttgcaggtggtggtgccggatttgcgcggctatgaacggtttgtcaccggcagcctgttgaagctgccgggggtgagggatattcgcagcaatttcgcgatccagaccgtgaaaaccccaggcgcattgccgctggggcatttgccgggctgatggcctacttgaaaccaccccgaaccctgtgggagctggcttgcctgcgatagcgtcggcgttgccgaaacagatgtcgcctgacccaccgccttcgcagcctcgctaaagctcgatagctcccacagggttactgcgggctcatgcagtccagtgaacggtccaccatgactttggccatctccatcaggtagccagcggctttgggtgaatcacttaacccttcggcgcagtggagcaggtctgaggcgtaggccagggcgtcttcaagactgaggtcggggtggggggtgaaaaagtggtggggcggatcaggtcttactttgctcattgcggtaactccaatgtaggtaattggagccgacagccatcgctgctaaacaatgggtggcagctgtacgcaggttagcaggccggaacattggtaatccgacgcacccgaaggtgccctgcgcacagccaccataaagcgttggcagaaaaaaacgccatgctagagatggcgcttgtgcgcccaatgttgaacgttcgagctgctaaacccggtcactgaattgacagtgacgaacgcagactagccaccgaaaaggcagggcacaagcggctgggattctctcggaaatgtcctgcgaaagaaagggactgagcaggtaggagcggcagtttcagactttccgcactttcgacatcgctccgaattactgtgggagctggcttgcccgcgatagcggtggcacagccagcatctatgccggctgacactccgtcatcgcaggcaagccagctcccacagtggatctttgctggggttgagggccgtgtttatcaggtccaccagtagcgcacgaggtggaagaaaatcggtgcggcaaaacacaccgagtccagccggtccagcatgccgccgtggccctcgatcatatgcccccaatccttcacgccccggtcgcgcttgatcgccgacatcacgatgccgccggcaaagcccagcaggttgatcagcagcgcaatcagaaacgactgccacgggttgaacggcgtggtccaccacagcgccgcgccgatcagggatgacagcaggatcccgccaacaaagccttcgacggttttggacggcgacaggttgggcgcgatcttgtgtttgccgaacagcttgccgcatacgtactgcagcacgtccgacagttgcaccacgatcaccaggtacgcgatcagcaacaggttgcggccttcatagccaggaatgtcgagggtcagcagcgcgggcacgaaggacacgcagaacaccgcgatcatcagcccccattgcactttcgacgcgcgttccaggaagtgcgtgctgtcgccaccgagggacgcgaggatcggcagcagcaggaacacgtagaccggaatgaagatcgagaacagcccgtaccagtccgaataaatcagcaggtattgcacgggcagcgccaggtaaaacgcggccaccagcgccgggtagtcgctgcggcgggtgggggtgagggtgaggaattcacgcagggcgtagaacgacacggcgtagaacagcaggatcaccgcgccggtgccgagccagaaggcgatgccgatgaccaccaccatcacccaccaggcgttgatgcgcgcattgaggttatcgatcaccgcgttgggtgtgccgcgtgtgcgtaatttgaggatcaggccgatcagcgaggcgagcaccaggatcgcgccgatgccgccgaataacatcagggtttggctatccatgtcagacgtgctccggggcgagggcgagcaaagcgttgcgggtacgggcgaggaaagcggttttttcttcgccttcctccaattgcagcggcgcgccgaagctggtggtgcacagcaaaggcagcggtagcacgcggcctttaggcatgacgcggttgaggttagcgatccacaccggaatcagttcggcctgtgggtaacttttcgccaagtgatacaggccgcttttgaacggcagcaggccgtcttccagattgcgcgtgccttcggggaagatgatcagcgaatcgccgccctcaagtgcggccagcatcggctgcaaagggttatccacagggtctttgcgctcgcggtcgatcaacaccccattgaacacccggttgatgatgtagcggcgcagcgcgcttttgttccagtaatcgctgccggccaccgggcgcgtgaatttgcgcaggttctgcggcaacgacgcccacagcaacacgaagtcgccgtggctgctgtggttggcgaagtagatgcgctgcaccggcacgggcgcacaaccgagccacaggctgcgggcaccggtgacggtgcgggccatcgaagtgataagcgtggcgaccacgggttcgaacatgggaattccttatccggcgaaaggcagccaagggctggcgaggatcacggccagggtcagcaacgcttgcgcgcccagcagccaggcctgtttgcgcagtagtttgagcgcgccgcggcgacgttcggtccagggccggccaacgcgcttggccgattgcaggccgagggtttgcagggtttggtcgaggtccggggttcgctcagtgtcccgggccaggagcgtgaacaggtcagcatcgaaggccacgcgcaatgcccagtacttttgcagcagcccgaggacaatcatccacagcgcgagcagcaggcagatggtggaaatgctggccatcaacagctgcgccaggccgaatagaaagccgagcagcgtcaggcctgtggataactgatccagcgagcggccacgacgcagcaggctggcgacgacctgcagttccatatcagcgggcatggggcaaaccctccaaagctttacggtgagcggggtgcaggaccacacgggcccgcgctgtacgaataatagccagtgcctcatcgacggttgccgcgcgcccgctgtgcagcagccaggcggcgacggcggtggcgctgcgcgaataaccaagggcgcagcacaccagcagcgggccgtgcgtgcgcaggtgttcgatggcttgagcggcttgcaggcattcgtccggggtcggggcgacaaggtccagcacggggatgggttgataagcgcggccctgtggatcaatcggcagttcggcgcagagatcgacgattgccttgaaggcgccttgctcactcgttgcaggaatccgcccgagccaaatgttatccacaatcaggtcgggttgtggatgcttacgggtccacaggcgtgaatttagccacgcgcctgccagatagggcgcgtacagccagcgtgcggcgggggtcagttggccatcggcacgcttctgaaagccggatgctccgagcacaaagtaattggctttgatcaaaccgagggaaaccgccggccaaagcaaccataaccacccgccgcgtaatacgaaggcaagaaccaccagcaccagcgcgcccagcccatagcgcgcgccgagccgccaacgctggggatcgcgcgtcagccggctattcagcagcgggctccggtgctcgaccggccacagccacacgcaaagccagccggcgagagcgcctgtgggtaagtcgataaagtgatgttgataagtggtcagcactgaaaggccgatcaatgcgaaccagccatgcaccagcaggcgccagaagccctgggtgtggcgctggtacatcacccacagaatcaccagcagcgcgatatgcagcgacggcgcctgattgaagggtttgtcgaaccccgccagcaccgcaaacagccagccaaatacgccatccagctccggccgttcgaaggtaaagcgcagcggccagatcaggaagcaactcaccgcaatgacttgcgcactgagcaggcgcagcgcgtgttgtttcagctcatgccgggtattgggcagcagcagggaaaacccgtagagcaggtcgatggaccagtacggcacgatggtccaggcccagaacggcatatgggtttcccagccgaacaccagcgtgccgacgtcgctgcgctggctggtgacccacgtagcgaaaccgtaggtgctgaaaaacagcggcgccaacagcagcagccagaggaccgccggtttcaataggccggattcgcgcatgttcagatcttctgcgccagggacacgctgaaaatgccccactcatccacacgctgggtgatcttgcgaaaacccgccgcttcgaccaattgatccatttccgcctggctacggcggcgcatcacccaggcctggccctggcggtggctggtcaatgcacgggcgatcaactccagttgcgggtgccacggctggccggtgtagaccagataaccgccgggctctatggcttcggcaagacctgccaacgagccgccgaccatggcgttatcggcgaataactcatacaagccggacaccaccgccaacgtcggcttggggtccagcgctgccaaatccaggcggtcaaacgcatcgcctttgacgaactgtgcgatatcccccaggcctttctcgcggatcaaggctccaccgtcgcgcacgttgatgtcgctgtagtcgcgcaggaggatcgattccggcagcggcgacacgccctgcaaggcttcgagaatatagcggccgtggccggcggcgatgtcgacaatgcgcacttcacgctcagccgcacgcaacctggccatggccaggcgcagcaattcttcgacattcagtttgcgctgacgaatcccgcgccagccgatggagttgaggtagttggtgtcgatcatccgccccagcccgcccttgccggtgggtttgttgcggtacacgtagtccagggtgctgccggagtcgaagcccgtgtcgaagcctagcttgaccccgtccgacaggttcttgcccaggcccatgctggcgcgggtcatgcgccagtacaggtcgcgcaaggagttgcgcggcagcggcgcggcgagggcttcggactcggcgcaggtggcgcccagtttgtcggcgtccagcaaagacgcgcggtccagcggctgcgtgaagttctgcaggataaagcgcttggcgctgctcacggccaccgcgcggtcgcgttcgccgagggtgtcgtggaagaacccgggaagaatgtgcagctcttttttcaggctgccgaggcggtcgaaaaactgctgctggggcttgcgatggaccacgaagtccgagccggaaatcagcagctgagtcggtacctgaatcgcttgggcgtcggctaccacccggtcggcggcttcgtacaggccgagcagcacattcaccgaaatggccttggtaatcagcgggtcgctgtcgtaggacgccacgcgctccgggtcatggctgaggaacttggccttgacgtaactgttgacgaaaaaattgccgcgaaacctgcgcatcaacgccaggccggggcgggcgaagggcacgtagagcttgaccttgaacgccggggaggccaacaccagtgcgcgaatcttcggcgcgtagtcgtgcacccaggtcgccgcaatcaccgcgccgacgctttgagcgatgacggcgatgttttcttcttcgatgctgtaagtggtgccgatgtggtcgcaaaaggtttgaacgtcgcgggcgctggtggcgaagctggggctgtcaccgcgttcgccgggggattggccgtggccgcgggcgtcccaggcgaagaagtcgaattgcgccaggtcgagttcatccaccaggtgggcgatgcgccccgagtgctcgtggccgcgatggaacaacaggatcgcctttcgcggctcatcaccctgtggggcggtggccggccagtgccggtagaaaagctcaacgccatcatgggtactgaaggtgtgctcttgctgttcacgcatcgcaaaaatccttatgcaatcggaggggtgggtacttctttgaggccttggcgcacgcggttgaccagggtgtaggcgagcagggcggcgaccagccacatgacggtgtcgacccagcccgcgccgagccagcccagcgccacaccggtggccagcacgccgagcacgaaggcgcgatcactcttgcccatcggcccgtcatagcgccgtgaagcaccgaccatcggcccaagtaccccggcgtattcgctgaacacggcgagcagcgccaccaacagcaccggcaccaggttcacgccggggatcagcgcaaagggcaggatcagcgcactgtcggcgatcacgtcgcacagttcattgaggtaggcgcccaggcgcgactgctggccgaattcacgggcgagcatgccgtcgatggcgttgagggccatacgcaggatcatccacagcggaatcagcgcgaacagccagaggtgctgggcgaagctggcgatcaacaggccgaccagcagggaaaccacgccggccagcacggtgatctggttggcggtggtgccgttgtcgtagaggcgctgcacgagggggcgcagcaggttttgaaaacgcggcttgagctgatagatcgaaatcatggggggtggcgcttccttgtccgtgaacccgcgaaaactgttttggagtgtgccgattaatcgtggcttgcaccagtgatggctcgtgtttctgggggtttaatcacgatctgctacacaccgcagtacaaatgtgggagcgggcttgcccgcgatggcgacctatcaggcaaaacctctataactgacccagcgccatcgcgggcaagcccgctcccacaggggatttgtgctgtttccgaacaaaaatttcacgccccgtgttatatcgtaacgaattgtgtacatgtgggcgttgagtggatgcaagtggatctagaagcggacggcacctcggtcgagggccttgcgcgttttcaacaggggttgtttcacgcccgcaggctccggcaagccggcattggcctgacggccctggcggtgtgtggctgggtgctggcgctgtttgtcgcgttgtttgcgccgttgtcgatttggccggtggtgttgatcaactgtgcatccgccttgctggtgctggtggccggattgcagtccgcgtggtgggttgccgattggcgcgcccaggccctggaagagccgacgactgaagtcgtcgaactgccggtggaagagtcaggcttgtacgcgcgtcttgtagggcgtttcggcagcggcttgatcgcgcagatcggcgcgccggtactctggctggtcggctggtcgttgctggcgctggtcagcatcctcgaattctggaacctggcgttgcccgcagccgctgtcgggcagtccgccagcatcggcgccgcgctggccttggccctggcgtttggtttgctggtgttcgagcgccgcctggcgcaggagaccgccgcgcaatggccagaagcctcgcaactggcgcaattgagccgggtagcgatcgtgagcctggtggccagtgcgatttgcctgctgttcgccagtgcggactcggtctggccgttacgcctggcggtgttgatcggcttattgccaggcctggtcgctgtcgaatttttgctcagggccgtgctgtcattgttcagcccgcgccagccgcgtgtcgaaccacgcctgatggcgcaaagttttatcgccgggctgctgcgctggccgccgcaacctttacaggcgctgcagcacgaattgcacaaccgcttcggcatcgacctgcgccagatctgggcattcacctacatgcgccgggcatttttaccggtgttgctggtggtgttggctgtcggctgggcgctgaccggcgtgcacgaagtgccgctgcagggccgtgggatttacgagcgttttggcaaaccggtcgaagtgttcggccccggcttgcatgccgggctgccatggccgttgggccgcgtactgaatgtggaaaacggcgtggtgcatgaactggccaccagcgtcagtgaagccgcggcgcctgaattggcgcccgccgagggcccggcgccgaccatcgccaaccggctgtgggacgccagccatgtgaatgacaaatcccaggtgatcgccagcagcagcggcgacaagcagggcttccagatcgtcaatatggatgtgcgtttcgtctaccgtatcggcctgaccgatcaggccgcgctcgccgccacctataacacggccgacgtaccgacgctgatccgcagcacggccagccgtattctggtccacgatttcgcctcgcgcaccctcgacgagctgctcggtgaacaacgcacccgcctggccgatgaagtcggccgcgcggtacaggctgacctgcaaaaactcgacagcggcgtggaaatcctcgccacggtggtggaagccattcacccaccggcgggcgcggccaacgcttaccacgccgtgcaagccgcgcagatcggtgcccaggcgctgatttcccgcgagcgcggcgcggccagcgagcagaccaaccaagccttgctgcaagccagcaccgcccgcgatcaggccttggccaccgcgcgcgaagtcaatgcaggtgcccaggcggcggacctgcgctttgccgccgaacaaaaggcctacgccaccgctggccaggcgttcgtgctggaacagtacctcggccagcttagcctgggcctggcccacgccaagctgcttattctggatcatcgcctgggtgccgacggcgcgccgacgatcgatctgcgttcttttacgttgccggccgacccttcggcgccgcgcaaagccgttcaataaggagtctgtctgttgagcgctcattctcacgatcacggtcatcatcatggccaccaccaccatcatcatcacggtgatgagcaggctggcggcccgttcccttggcgacgcatggcctgggcggtgttgctggtactgtttgcggtagccgccgcaagcctggtgcaagtgcggtccggcgaagccacggtgatcacccgtttcggcaacccgtcgcgggtgctgctggagcccggcctgggctggcgctggccggcgcctttcgaggcggcgattccggtggacctgcgcctgcgcaccacctccagcgggttgcaggacgtgggcacccgtgatggcctgcgcatcatcgtgcaggcctatgtggcgtggcaggtgcagggcgacgccgacaatgtgcaacgttttatgcgcgcggtgcagaaccagccggatgaggcggcgcggcagattcgcacgtttgtcggctcggcgctggaaaccacggcggccagctttgacctgtccagcttgatcaataccgatgccagccaggtgcgcatcgccgatttcgaagcgcagttgcgccaacagattgatcaacaattgctcaccacctatggcgtgcgcgtggcgcaagtcggcgtcgagcggctgacgttgccgtcggtgacgctgaccgccaccgttgaccgcatgcgcgccgagcgtgaaaccatcgccaccgagcgtactgccgtgggcaaacgcgaagcggcgcagatccgctccgctgccgaacgcgatgcgcgcatcgtgcaggccgacgctactgtgaaggccgccgatatcgaagcgcaatcacgggtggaagccgcgcagatttatggccgcgcctacgcgggcaatccgcagctgtataacctgctgcgctccctcgataccttgggcacagtggtcacgcccggcaccaagatcatcttgcgcacggatgcggcgccgttccgcgcattggtggacgggccgaaggacgtccagccatgatcgagcgtgacggcccggacagcccgtggatccaggccgggcgcctgacctttctggcgctgtacgcagtgacggtgttggcggcgttggcctgggcgttttccaatgtgcgccagattgacccgcaaaatcgtgccgtggtgttgcacttcggcgcgctcgaccgcattcagaatgccgggcttttattggcgtggccgcagccgttcgagcaggtggtgttgctgcccgccgccgaccgcgtgatcgagcgccgcgtggagaacctgttgcgttcagacaccgcgattcaggccgaccgcgtggccagttttgccacgccactgagtgatgccctggccggttccggttacctgctgaccggcgatgccggcgtggtgcagctggatgtgcgggtgttctacaaggtcactgagccctatgcctttgtgttgcagggcgaacatgtattgcccgcgctggaccgcttggtgacccgtagcgccgtggcgctggcggcggcgcgcgatctggacacgattctggtggcgcgccctgaactgatcggtaccgataacggcgccgccgagcgtcgtgagcggctgcgcggtgatctggtgcaaggcatcaacaaacgcttggccgaattggcttcgaccggtttgggcctgggcatcgaagcgacgcgcgtggacgtgcaatcgagcttacccggcccggcggtgaatgcgttcaacgcggtgctgacagccagccagcaagccgataaagcggtggcgaacgcgcgcactgacgcagaaaaactcactcagaccgcgacacagcaagcggatcgtttggtgcaagtcgcccacgctcaagccagtgagcgcctggccaatgcgcaggcgcaaaccgcaaccgtcgccagcctcgctcaagtcaaagacccgggcttgctgctgcgtctgtaccgcgagcgtttgccgaagattcttggccaggccggctccgtgaccactgtcgacccaaaagacgactcccgtttgatcattcagggagccgaacaatgagcgcacccatgctgacatccgccgagcagcgcagtgctgcccggcaactgaccctggccatgctggccttggggttgttgatattgggcctggtatggcgctggctggcgccggatcagaatggggtcagccagttattgctgggcgtggcctccttgctggtggccgtgccggtgatgcgttcggcctggtacagcctgcgtttcccgagcctgcatggcatcactgaccaattgatcgcgttggcaatgattggcgcgtgggccacgggtgatttgctgaccgctgcgctgttgccgatcatcatgattttcggccatgtgctggaagagcgtagcgtgattggctctcaggaggcgattcaagccctgggcaaactgactcgcagccatgcgcggttggtgcaggtggacggcagcattgtggaagtggataacggcacgctcaacgccggcgatatcgtcgaagtgcgcgccggcgaccgcgtgccggccgatggcgtggtgctgtcgggccaggccagcctggacacggcgccgatcaccggagagtcggtgccgctggaagccagtgagggtgtgcaagtgtttggcggcgcgatcaacctggatggtttgctgcgtttgcaggtgacgcgtaccggcgatgagtcgaccttgggcaaggtcattgcgctgatgcagaacgctgagcgctccaagccgccgatcacgcggctgctggagcgttatgccggtagttatatggtgctggtgctgttgctggcggcggtgacctggtttgtgaccaacgacgcccaggcgatgctcgctgtgttggtagcggcatgcccgtgtgcgctggtgctgtcagcgccggccacggcgattgccgggattgccgtggcggcgcggcacgggatattgattcgcagctcggcgtttctggaagagctggcggacctgacctcattggtggtcgacaagaccggcacgctgacctttggcacgttgcgcctgcaatcgattgaaaccagtgcaccggatcggcagctgctgttgaacctcgccgccagcctcggctcggccagcagtcacccggtcagccgcgcgctggcggggttggcaacgcaggaacaactgctggtgttgacggatatccgtgagcgtcagggccttggggtggtggcgcagaccgagcagggcgaggcagcgttggggcggccggaattattcgagcaactgggcatcgtcaccacggctgttcccaaccacgatggcccgattgccgggctggcgctgaacgggcagttcctcgcatggttgttgctggctgacagcgtcaagccggaagcccgccaggccctgcaagaactgcgcgatctgggtctgggccgccaactgctgttgacgggcgaccgccagagcgtcgccgacagcctggcgctggacgtcggcatcagcgacgttcaagcccaggcactgccggaagacaaactcaaccgcgtgctgggggaaatcagcagtggcttccgaccgatggtggtgggcgacgggattaacgactcgctggcgctcaaggcaggtgtggtcggcgtggcgatgggcgcgggcggggcggacatcgccctggcgtcggcggatgtggtgttgatcggcagcgatttgcgccggttgggtacttgcgtgcgcttgagccgtcagtgccggcaaacgctgcaggtcaacgtgatcatcggtttgggctggacgctggccatcgtggtgttcgcggccttcggctggctgggcgcggcgggcgccatgattgcggcggtgctgcacaatctcagtactttgctggtgctgggtaacgccgggcgtttgctacgctttcaggagccgctgttgaagctggatgaataaattttagaaatatttgcaaacaggtgtaacgccacacagggacctcactctagtgctatgtcgagactgaacaatccgttcagaccgactccactaccgatcatgaggaatacaaaaatgaacttcaaatccgctgctgctggtgccgccctcgcaatggccgccgctaccatgtttgctggtgttgtcactcaggctcaagccgctgacacctccgtgcactgctacggcatcaacgcctgcaaaggccagaacgactgcaaaaccaaagaccacgcctgcaaaggtcaaggttcttgcaaaggccagggcttcaaagttcaagccagtgctgatgcctgcaccaaggctggcggcaaagtcggcgaataaccggcaccgagtgctcccgcagcggatgccccccaccgctgcggacactttgcccaggagtgtctgatgtccgcttcccttccgagtctgggttacggcctgggtttacgcagtgagtactaccagcagatccttgaacagtcgcccgctgtggattggttcgaagtgatctccgagaattatctggttcagggcggtaaagccttgtactacctggacgcgatagccgagcgctatcccctggtgatgcatggcgtgtccctgtccatcggtgggccccatgccctcgacaccgattacctgaacaatatcaaacagctcgccgagcgcattcagcccgcgtggatttccgatcacctgtgctggagccgtggcagtgcgcaccagttgcacgatttgttgccgctgccctacaccgaagaaagtctttaccacgttgccggccgcgttcgccaggtacaggacgtgttgcagcgcccgttggtgctggaaaacgtctccagctatgtgcgctccaaggcagatgaatttaccgagtgggaatttctcaacgccctggcccacctcaccggctgccaactgttgctggacgtgaacaacgtgtacgtcagctcgcgcaaccacgggttcgacgcgtggacgttcattcgcaacctgccgccgcaaagcatccgccaactgcatctggccgggcatatggactacggcgattatgtggtcgatacccacgaccacccagtgtgtgacccggtgtgggcgttgtatcaacagacgcttgagcacttggggccggtgtcgacgctacttgagcgtgatgaccattttccgccgttcgaagaattgctcaccgagttgagcaaagcccgggagctgggtgcgactgccttggccaggagatcgctatgcgcctgaccgattggcagttggcctttgaacagcatttgttatccgacacctccaccgccaacagccactttgccgccaccttgctgggtggcccgacgctggatgtggacacgggcctggcgatttatcacaacgcttatgtctcgcggttgcaggaagtgttgcgccatgacttcggcgcgatctggtattggctgggcgatgatgaattcgcgttactgacagaagcctatgtgcgccgttacccctcggcccattacagcctgcgctggctgggtgagcgttttccggattttatcgtcgaacatctggtggctgaacaaagcccgccgctggctgaactggcgcggctggaatgggcgttcacgctggcgttcgatgcccctgaaggcgagccgttgagcctgaatgacatggccacactgccgcctgaagagtggccgggtttgcaggtgacgctggcgccttctgtgcagcagcagctctgtcatttcaacacggtagcgatctggcgagcgagcaaggatgagtcggatttccctgacagtcatgcacttgagctggcgcagatttgcctggtatggcgccatcaaaacgtatgccattaccgcagcctggaacctgcagaagcctgcgcactggcgggtatggtgaccaccggctggaatttttcagaactgtgcgcggagcttgcagtcacttatggagagggtgccccgttgcaggccgttacatggctgaaacaatggatccaggacggtttgctcgagcgccgagccccatagaaaagtgctatcaaatcgatagcctcctactttgtctccggatggtctaccctcactccagacgtctgaaacaaggggggactactcatgctcgcgcaacttccaccggccttacagaatctcaagctaccgctgcgactccgactctgggatggccatgaattcaacttgggccctgagcccagtgtgactatcgtggtgaaggaccccacggtcgtgaccaagctgacccatccaacgctcgactcattgggcgaagccttcgtcgagggcaaactggagctggaaggctccatctccgaggtcattcgggtatgtgacgaattgagtcacgccttgatcgacgacgacgaggggagtcgtccggtgcgctcgatccacgacaaggccactgacgcagcggccatttcctatcactacgacctgtccaacgagttctaccagctatggctggaccaggacatggcctactcctgcggttatttcgaaaccggcagcgaatccatcgaccaggcccaacaagacaaattccgccacctgtgccgcaaattgcggctgcagccgggtgagtatttgctcgatgtcggttgcggttggggcgggttggcgcggtttgcggcgcgggagttcggggtcaaggtgtttggcatcaccctgagcaaggagcaattggcgctggcccgtgagcgggtcaaagccgaaggcctggaagatcaggttgacctgcaactgctcgactaccgcgacctgccgcaggacggccgtttcgacaaagtggtcagcgtgggcatgtttgaacacgtcggccacgccaatctggcggaatattgcaaagtcctgttcggcgcggtgcgtgaagggggcctggtgatgaaccatggcatcaccgccaagcacactgatggtcgccctgtgggccgtggcgccggggatttcatcgaacgttacgtgtttcccaatggcgagttgccgcatttggcgatgatgacggctgaaatcagcgaagtcgggttggaagtcgtcgacgttgaaagcctgcgcctgcactacgcgcgcacgctggaccattggagtgagcgtctggaagacaacctggaagctgctgcgaagatggtgccggagcaggcgttgcgtatctggcgcctgtacctggccggctgcgcgtatgcgtttgcgcggggctggatcaacctgcatcagattctggcggtgaaaccccatgccgatggcagccatgaactgccgtggacgcgggaggatatctaccgctgatctttgagcctctggaggtcaaaaaactgtgggagctggcttgccttcgatggcggtgtatcagtcgactaattcggccctgatacaccgctatcgcaggcaagccagctcccacatgttttaaccgagttgtgtgttagagaatcggtgaaataagccgcgccacccgcatgcccaactgttgaaggcggcgggtttctcggctttcttcctggctgacctcatgggccagggcaaagtcatccagcagcatctgctccacttcgctggcgaaggcctcgtcgaccgtcagcaacatcacctcgaaattcagccggaacgaacggttgtccatgttcgcactgccgatggcgctgatttcactgtccaccaacaccaccttctggtgcagaaaccccggtttgtagcggaatacccgcaccccggcgcgtacggcttcgatcgcataaaggctggaggcggcgtacacgatgcgatggtcaggacgcgacggcagcagcacgcgcacgtctaccccgcgcagcacggccaggcgcagggcggaaaaaacggcttcatcggggatgaaataagggctggtgatccacacgcgctcggtggcggcgtgaatggcttcgacgaaaaacagcgagcaggtttcgtacgggtcggccgggccgctggcgagcagttggcagagtacgccgtcttcggggtaggcgtccggcagaatcaatggcggaagttcgcgcgcggcccagaaccagtcttcggcgaacgattcctgcaggcacgccaccaccgggccggtgacttgcacgtgggtgtcgcgccacggcgccaaaggcggttttttaccgaggtattcatcgccgacgttgtgtccgccgacaaacccggtgatgccgtccacgaccacgattttgcgatggttgcgaaagttgacctgaaagcgattgagccagccgctgcgggtggcgaacgctttgactttgaccccggcatcgcgcagcgattgcacataacggtgcggcagggcgtggctgccgatgcggtcgtagagcacgtgaatgtctacaccttcggcagctttttccttcagcaaggcatgcaattgcctgccaagctcgtcgtcatgaatgatgaagaactggaacagcacggcagttttggcgttgcgaatcgcttcgaagatcgcgctgaaagtggcatcgccattgatcagcaagcgcacttcattgttggccaggcagggcatgcgtcccagcttgggcatggcgcgcaacgacgcataggcactggagttgcgcgcggcaagggcctcttcgacccaagggcgccagttcagctcggtgatcgccgtgtgcatttcctggttggcctggcgccgcgcctggatgtacgcatcgaacgtgctgcggccaaaaatcaggtaggggatcagcgtgaggtaaggcatgaacatcagcgacaaggcccaggcgatcgagccttgggcggtcctgacggtcagcaccgcgtggatggcggcgagggtcccgagaaaatgcagcgtagcgatgaaataggcgagcaggtgcgggccaaaaaaatccatgaacgacatctctccaggcgatccaagtgcctaacagaccatgaacggcggcgaatgtcgctattttatttgccgtgcaacactggcggctttgcggcgtctaacgcccacaattacccaggagttactcgatgaatgctcgtctgccagttttggccatggtcgttggtttgttgctgcccgtggcggctcaggcgcagatgctggcgccgggcttgtgggaattgaccaccagcaatatgaaagttgataaccaggacctgccggacctgtcgctgatcctcggccaactcaagcaacagatgacccctgaacagcgcgccatgctggaaaaacagggcatcaccatggccggtaaaggcgtgcaggtgtgcctgacgccggcgcaggtggcctcggactctattcccctgaccgacccgcaatcgggctgcaaacaggaagtgaccgacaagaccggtaaccagtggaaattccgcttcagttgcccgaaagcccagggtactggcgtggccaccttcaagagccagcaggagttcaccaccacggtcaacggcaccttcaatgccaccggcatccaacagaagggcagcctcgacagccacgcccaatggctgggcagcgactgcggaaccgtcaaaccccgcgcttaacgcagaaagtgcaggggcaagccctggcagctgtcgaccacttggccgttgtgccacgccaagtggcctgacaccagtgtggtgctgacgctgtggcgaaagctgcgctcggcaaacggggtccagccgcagcgtgccaggatcggctggctgctcaccggtttgccttcggcctcgggctggatcaacaccaggtcggcccaataaccctcacgcacgtaaccacggtcgggaatggcgaacagatcggccacacgatggctggtcttcgccacgagcgtggtcagcggcaggtgcccgtcagccaccaactccagcaacgccggcaatgcgtgctgcaccagcggcagcccggagggcgcttcgcgatagctcaattgtttttgcgcccaggtgtgcggcgcgtggtcgctgccaatcacatccagccgatcactcagcaaggccaggcgcagagcatcgcggtcggcgcgggttttgatcgccgggttgcatttgatctggtggccaaggcggtgatagtcgcggtcgtcaaacaacaaatggtgcaggcagacctcggcggtgatgcgtttttccgccaggggtttgttttcgaacaggtccagttcgcgggcgctggtcaggtgcagtacatgcaggcgcgtgttgtggcgcttggccaattccactgcaaaggatgacgagcgatagcaggcttcggcatcgcggatcagtgggtgggcgacggcgggaatctggtcaccaaagcgctcgcgcaggcgttgctcattggcgaggatgctcggcgtgtgttcgcaatgcgccagcaggatcgtcggcacttcggcaaacaaacgctccagaatccgtgggtcgtccaccagcatgttgccggtggatgcgcccatgaatactttgaccccggcgacttcgcgcgggtcgagggcagcgacggtgtcgaggttgtcgttgctcacgccaaagtgaaagccgtagttggccaccgagtgcagcgcggcgcggcgctttttatcggcgagggcttccaggttcaacgtggccgggttggtgttgggcatgtccatgaagctggtgatgccaccggccactgccgcgcgggattcactgtagaaactgcctttgtccggcgcgccgggctcgcgaaaatgcacttggtcgtcgatcatccccggcagcagccactggcctttggcatcgatttcaaccggctcgttgtagccttccaggctggtggcgatcttctcgatacggccattggcgaccagcacgtcagcgtcgaattcctggccctcattcaccaggcgggcgttgcgaatcagcaggcggctcatggttcagaactcgttttgcagggctttgtagccgcgtaccaaatcgacgttggtgcgtgccacgtcttcggaaaactccgaggcgctgacgctgaccggcgggaattgcgacaggtcggtattgggcccgatgcgggtggtggagggcacgtagaacgcggcgggcaagtcgcggccatcgaccaccgagttgtggcgcaccacgcagccgtcgcccacggcgcagttgaacagcacgctgttgaagccgataaacacgcggtcgccgacgacgcaggggccgtggacgatggagcggtgggcaatcgaagtaaattcgccgatggtcaccgccgcgccggacttggagtggatgaccacgccgtcctgaatgttcgagttggcaccgatggtgatcgggtccatggcgccgctggcgtcaacttcgtcggcgcgaatcacggcgtaaggaccgacgaacacgttttcgccgatgatgaccttgccgcagatgatcgcggtcttgtcgacgtaggccgattcggcaatcaccggcaggtcgccggaagggttcttgcggatcatgcaacaggctccgtgatgatgtgaacgtggtcgccgtcaatggcgttgtaaaagcaggttggccggccggtgtggcaggcagggccttgttggttgacgatcagcagtaccgcgtcgccgtcgcaatccagccgcgcttcgaccagctgttgccagtggccggagctttcgcctttgtgccatagctgctggcgcgatcttgaccagtagcagacttgcccggtcgccagggtttcgttgagggcctggcggttcatccaggccagcatcaacacctcgccgctgccgtgttgctgggcgatggcggcaatcaggccatcgctgttccaaggcagggcgtcaagcacgggttcgagtggaaagcggctgcccagggcagcctcttccaggtcgagcatgctcaaggtcatggcttgctcagggccgcgcacaaggtattgaggttgtattcgaacagcccggtgaaggtgctggccgggccttcggcggcgagggcgtcggagtacagtgtgccgccgatttgcgcgccgctttcgtcagcgatctgcttgagcaggcgcgagtccttgatgttttccatgaacacggccttgaccttgtctttgcggatctgggtgatcagcgcggcgacttcggcggccgacggctcacgctcagtcgacaaaccctgtggcgcgaggaactgaatgccataggcctggcccaggtaaccgaacgcgtcatgggaggtcacgatgcgacggttacccgctggcagtgcgccgaatttggctttagcttcggccagcaagcggtagatttctttcaggtaggcctggctgttgcgcaggtaatcagccttgttggccgggtcggcggcgaccagtgccttggtgatgttgttcacatagatttcggcgttggccaggttgtgccaggcgtgcgggtccgggatggtttcgccgtcttcttccatggtgtgggagatcacgcctttactggcggtgactacggtggccttggtttcggtgctggtcaccagccggtcaagccatggctcgaagcccaggccgttcttgatgatgaccttggccttgagcagcgccttggcgtcatccggggtcggctcgtaggtgtgggcatcggagtcggggccgaccatgttgctgatctggatgtgatcgccaccgatctggtgggtgatgtcatcgagaatactgaagctggtgactacctggagtttgtcggcggcctgtgccatcgacaacggcagcagcagactgaacagcacgagtaaagcgcgcatcgggaaacacctcattgggatgtaagagagggcgggcggcgcagcagaccgtgcaccgggccgaaaaccacggacagcaaataccccgcgccagccaccagcacgatggccgggccgctgggcagtgagtagtagaacgacagcaacaaaccgaaccacaccgacaggcatcccagcaccgccgataccgcgatcaacaccggcaggcgccggctccagaagcgtgaagcaatggccggcaacatcatcaaacccaccaccatcaacgcgccgatcgcctggaaaccgatcaccagattcagcaccaccagggtcaggaacaacccgtgggcgagtgggccaaggcggctgacggtttgcaggaacagcgggtcgagggtgtcgagcagcagcggtttgtagatcaccgccatggcgatcaggctgaaactcgagacccacagcatgccggtgagggtggtttcgtccacggccagagcggagccgaacagcaggtgcagcaggtccaggcgcttgccggcgatgccgaggatcagcacgccggcggcgagggagatcgggtaaatggcggcgaggctggcgtcctctcgcaggccggtacggcgggtgatccaggccgacaagccagccatgcccaggccggcgccgaggccaccgatggtcagggcgggcaggctgatgcctgcgaaccagaaccctagcgcagcgccgggcaagatgccgtgggccaccgcgtcaccgatcaggctcatgcgccgcaggatcaggaacacacccagtggcgcggtgctgcacgccagtaccagcccgccgataagggcgcggcgcatgaaaacgaagtcgtgaaagggcatccacaagtgggcggcgaagtgcatcaggccacctgcatttggggttgcgggcggatcaattctttactggggccaaacacgcagccgctgcttttgatttgcaccacttgttgggtgtgatggcgcacggaggcgaggtcgtggcaaacgatgactactgtgcggccctcatcgtgccaggcgtgcacgtgtttccagcacagggcctggccttcttcatcgagggcggcgtggggttcgtcgagcaacaacacgggcgcttcgaccaggctcatgcgggcgagcagggcgcgttgcaattcgccgccggacagagccattagcgggcgatgttccaggccgctcaagcaccagtcttccagcacggcgtgcaggcgttggctgcgttgctcgggcgtgagtttggtgccccagaaaccggcggcgaccagctcttgcaggctgatcgggaattgtcgatccaggtgttgctgctggggcagaaacgacaggccgccacggcgtagaacctccacgctgactttgcccgccagcggcttttgcaggccggcgatgactttcaacaggctgcttttaccggtgccgttggcgccaatgatgccggtgaggctgcctttttccagcgtgaggtccagggcgggtgtcagcggttggccgggggcgccccaacgcaaagcgttacaggtgatcatgcagggtttctcgtccagcggctttcagccacggcatcgtgcgcgtgcaggctttcggcgtggatcactttcaggtgaaaagctttgactgcatccgagcgtttcaaggcgaggttcaggcggcgggcagcgtcttcgcagaacatcaggttctgcccgttggccagggcgaaggcttgttcgtccgcgcgttttacggcggtttgcacggcggtgccgagggcggcttcgacgtcgtcgatcaggtcggtgagcggcagcgacggcagcgtttcgtccagttgcagggaaatttgcgcgctgctgcgctggctgtggggcgtggcgacgatgccgttggcgctgccgagccaggtcagcacgtcttcatgctgcaacggcgtgttggcgaaatcatcgataaattgctgctgaatcaactgcctggcgagcgcagcagagcatgggcaggttgaagagtaagtaacgtcaatttttagttccacgtggaacattcgattttccagacgcgcttcgatgcacaccgggtagcctttccagccggccagtgggctgaccagcgccgcgcgttttagcagcaaatcggtgtggatgcgcagggaggcgttcttagataaaccttcatgactctccagaaagcgctcaagtagagtacgcagaagcgcaggcgtcagcggttgttggtcgagcatttccagggccaggtacaggcgtgacatatgaatgccacgggcttcgccgtcgtccaggctcacgccggcatcggctgtggcggtcaggcgttggccgtcgatgaggataggcaaggcgatgccgcacatgcccacccaatcgagtggcaaggcttggcgtgaagcctgcgcggcgatatccggcagagtcagcgcattcatgggcaggtccatcgttggaaataaaaagacatgttatattataactattgagtcgacgatgatttttctgcttcagcctttcttcagtcatgtcgagcagggacgctcctttatttgcggtatttgtcatgcacagacgtcagctccttaacctgctgctggtcagccccctgttcactttgccgttgggggcctacgccacgcagattcgcaatgcgcgcctgtggcgctcggacgataaactgcggctggtgctcgacctcagcggcccggtgcaatacaagaccttttccctgacttcgccggaacgcgtgatcatcgacctgagcggcgccgggctcagcggtgacttttctcaacttgtgctgaaaaacagcggcatcacctcgatccgctcggggcatttcggcaagggcgacacgcgcatcgtgctcgacctcgccgcgccgatgcagctcaacagctttttgctaccgccccaggatggccagggccatcggctggtgctcgacctgacaggtgccacccaggcgcctcgccaaatcgccgctgaacccgcgccgttggttgcgccggtggacaaggcgcatcccaagcgagacatcattgtggtggtcgaccccggtcacggcggcaaagacccaggcgccgtcggctccaagggccagcgcgaaaaagatgtggtgttgtcgatcgcccagctgttggccaaacgcttgaagcgcgagaagggctttgacgtgaaactggtacgcaacgacgactttttcgtgccattgcgcaagcgtgtggacattgcgcgtcagcacaaggccgacatgtttatctcggtgcacgccgatgccgcgccacgcctcaccgcctcaggggcttcggtgtatgccttgtcggaaggcggcgcaacgtccgccaccgcacggttcatggcgcaacgcgaaaacggcgccgacctgctgggtgccaccacgctgctcaatctcaaggacaaggacccgatgctggccggggtgattctcgacatgtcgatgaacgccaccatcgcctccagcctgcaactgggcagctcggtgctgggcagcctgcaaaacatcaccacgctgcaccagaaacgcgtggagcaggccggttttgcggtgctcaaatcaccggatgtgccgtcgatcctggtggaaaccgggtttatctccaacacccaggacgctcagcggctggtaacggcgcgtcaccaacaggctgtggccgatggcctgttcgaaggcctgaaaaagtatttccagaagaacccgccgatgaacagctacatggcctgggttcaggaacagcagaacggtcaggtctagcagccggtcattcggctacacgtgaacttggcgctggcgccaccggaactggaaaaccggttaatggtggtccagcctacgcggcgtgtgtagccgacccacgcctccccatcggacgccaacccggtaaagaacgtcagctgcccgtagcggctgctggtctgtgcccagtagcgtttgccgatcacctcaaaaccgcgcaaatacgtagtgctgcctgctgttgccacgctgtaggcattccccagcgggtccacacaggccagcaagttggcgctgcgcgtgcaattggccagcgggcttggcgtttgcgcgcaggccggtcctgcggctgccaataacagggcgcacaccagatatttcatagggtttctcggggccgggaagtgttcaagcattgcgcccttcgtcgtgacgagcaaggggggattggcttatttgtattgttatactataacattaaaaaacagcctgacccgtgaactgctttccatgactgaacaagacctcctggcccaaccgcctgccgactacatgaatgaagcccagcaaggtttcttccgcgagttgctgctgacccagcgctacgaactgcaagcgcgcatcgagaccgagtttctgctgctgcgcgagcaggaaaccaacagcgaccccgccgatgtgggcagcgccgaagaacagcgtcaatggcaactgcgcctgttggagcgggaaaaaaagctgttggacaagatcgacgacaccctggaattgctggcccgcggcgagtacggctggtgccgtgaaaccggcgaccccattggcctgaaacgcctcctgctgcgccccaccgcgactttaagtatcgaagccaaagaacgtgaagagctgcgcgaacgccataaacgggcgatttgaccggccacccctgatgaggattacctgatgaccaatcgtctccccgttaccgtgttgtccggcttcctcggcgccggtaaaagtacgctgctcaattacgtcctgcgtaaccgcgaaaatctgcgcgtggcggtgatcgtcaacgacatgagcgaaatcaacattgatggcagtgaagtccagcgcgacgtcaccctcaaccgcgccgaagaaaaactggtggagatgagcaacggctgcatttgctgcaccttgcgtgaagacttgctcgaagaagtcggaaaactcgccaaggaaggtcggttcgattacctgctgatcgagtccaccggcatctccgagccattgcccgtggccgaaacgttcacctttcgtgacgagaacgagcaaagcctggctgatatcgcgcggctggacaccatggtcaccgtggtcgatggcatgaatttcctgctcgactatcaggctgccgaaagcctggcctcacgcggcgagactctgggcgaggaggacgagcgttccatcaccgatttgctgatcgagcagatcgagttcgccgacgtgatcctgatcagcaagatcgatctgatcagcagccgcgagcgcgaagagttgattgctatcctcgagcgcctcaacgcccaggccgaaattatcccgatggtcatgggtgaagtgccgctgaacaaaattctcaacactggccggtttgacttcgaacgcgccgcccaagcgccgggctggttgcaggaactgcgcggtgaacatatcccggaaaccgaagagtacggcatcgcctccacggcttaccgtgcacggcgcccgtttcatccgcagcgcttcttcaactttatcgaccgcccttgggtgaacggcaagctactgcgttccaaagggtttttctggctggccagcaagcaccaggacgcgggcagttggtctcaggccggtggcctgatgcgccatggtttcgccgggcgctggtggcgttttgtgccgaaaagccaatggccgcaggacgaggaaagcgtggccgccatcatgggcaactggcagttgagcaccggcgattgccgccaggagctggtatttatcgggcaaaacattgatttcaaccagatgcgcgccgagttggacgcgtgcctgctcaacgatgaagaaatggccctgggcgtcgaaggctggcgcctgttggccgacccctttggcccttggtatgaggaggcggccgcctgatgctcgccccggtgattcccctgcgccccgtgatccgccagacccgcggtgaaaccccgctggcgctgtccgacatccttaacgacggcgtcaacctggcgctgtggcagcgccagttacctctgcatatcgccgaattcggcgccttgctggtggcgctcaacgagccgcttgcggattccatggtaattgagctgaaagatgatgactcggtgccgaacctgcaaggtttggcctccagttgcagcgatcttgaaggctacgaaggctttatcgccgatgtgtcgtggctggtcagcgcgtttgcttgcctgctcggagccaggcgcattggcgtgcgactgcggttactggacaaagccatgtgcccgcgttttcacgttgaccacgtgcccgtgcggttgattaccacgtacgctggtatcggcagccaatggctgcgcgaaggcgtgatggaccgacgcaagctgagccagccagacgcagagcccactgaccgcatcgagcaaattcactgcggcgaagtcgcgttgctcaagggcaccaaatggcatggcaacgaggctaacggcctgattcaccgttcgccggcactcaaggccgatgagcggcggttgatcctgacgctggattggctggcataaccgcgtaggatcaaacgctctacacggtctgaatgaagccctccatgctgcagaatattcccacccatgtgattgccgggcccttgggcgccggcaagaccagcctgatcaagcacctgctcgcccaacgcccggccgacgagcgctgggcggtgctgatcaacgagttcgggcagatcggtctggacgctgcgttgctcacccaagatgacgatggcattgccttgggcgaggtggccggtggctgtttatgctgtgtgaatggtgcaccgttccaggtcggcttgggccgtctgctgcgtaaggcgaagccgcaccggctgttcatcgagccctcgggtctgggccacccggcgcagttgctcaggcagttgcgcgaagcgccatggcagggcgtgctggcggttcagccgtgcgtgttggtgttggatgcccaggcactggcggcgggtaaacccttgcctgatgcgcaacgtgaggcgttgaccagcgccgggctgctggtattgaacaaggatgaggcgctggatgccgcgcagcaccaagctatcgaacagcaactaccggattgcccgctttattggacccgcaaggcgcaattgccgctggtgcggctgcccgggctgaacgcaatagccgctgcggctgtggataacttcgcggtgcccacgggcttggcgcaaatgccagcgatgtggagcgatccgcagttgccgatttgcttgagccaagctcaagagggcggctggagcatcggctggcgctggcatccgagccaggcattcgacacccagcgcctggagggttggctgacaaacctcgattggcgtcgcgccaaactggttatccacagcgctgaaggctgggtaagcgccaacgctgtggataacagcccactcagctggcaagccagcgaatggcgtcgagattcacgtattgaattgatcttcagtgcgccacaggacgtggccgcgttacaggctgctctggccgcctgccgtcagtgacggtttttgctggcgtggtcctggcgccactggctcagctcaatcacctcggcgctgggcagcggggtcttgatctcgaacgggtagggcgccagttcgatttgcgcgctgtgcgcaccgaattgggtgatcgtcccggggtgacgggtttcgccggtcacggtgaactcgaagttgtagatgcgcgccagacgccgccgaccattggcatccttcacaaaaccaatgcgtttgagcgccaccgcgccgtccagcaactcgatatcgagcttggcgcaatgctgcttgacccgctccagcgcccgttcgcgcaggccgtggttgtgccacacccatgccgcgcccgtcgccagcagcatcaatacgaagatgtttcccagggtgagcatgcgatgaactccaacaaagtgagagcagcttaactgtgtcgccggtctgtcgtacaggctgcgtttagtcgcatactgcgcggccagaatttcaacggctttacggaaatctcccgcatgaaacgcacacctcatctgcttgcgatccagtctcatgtggtctttggccacgccggaaacagcgccgccgtgttccccatgcagcgggtcggggtgaatgtctggccgctcaacacggtacagttctccaaccacacccagtatggccagtgggccggcgaagtgttggcgccgcagcaaattccggctttggtggaaggcattgcggcgatcggcgaactgggcaattgcgatgcggtgctgtccggctacctcggtagcgccgaccagggccgcgcaatcttgacgggcgttgcgcggatcaaggcgatcaaccccaaggcgctgtacttgtgtgacccggtgatggggcatccggaaaagggttgcatcgtgccccaggaggtcagtgatttcctgctggatgaagccgccgccatggccgacttcctctgcccgaaccagctggagctggacagcttcgccgggcgcaaaccgcaatcgctgttcgattgcctgggcatggccaaggcattgttggcgcgcgggccgaaagccgtattggtcaagcatctggactatccgggcaagctgccggagggtttcgaaatgctgctggtgaccgccgagggtagctggcacctgcgccggccgctgctggcgtttccacgccagccggtgggcgttggcgacctgacctcagggctgttcctggcgcgcgtattgttgggcgacagcctactggcagccttcgaattcaccgccgctgccgtacatgaagtgctgctggaaacccaggcctgcggcagttacgagttggaactggtgcgcgctcaggaccgtattgcccatccgcgtgtgcgctttgaggccacgccgatcggtttgtagtcacgcaaaacccaatgtgggagctggcttgttgtggcgagggagcttgctcccgctggagtgcgaagcgctcccaagatttttggggccgctacgcagcccagcgggagcaagctccctcgccacaacaagcccgctcccacattttttgatctggtttacagaccggggcttacggaccgtccgccttgatttcctggtagcgcttttccagctcctggcgaatctgccggcgctgctgggcctgcacgaagcggcgcttgtcttcgctgttctgcggctgcagcggcggcacggcggcaggtttgcgctggtcgtccacggccaccatggtgaagaagcagctgttggtgtggcgcaccgagcgctcacggatgttctcggtgacgaccttgatgccgacttccatcgaggtattgccggtgtagttgactgacgcgaggaaggtcaccaactcgccgacatggatcggctcacgaaaaatcacctggtcgaccgacaatgtgaccacataacggccggcataacggctcgcgcaggcgtaggccacttcgtcgaggtacttgagcagggtgccgccgtggacattgcctgagaagttggccatgtctggggtcatcaataccgtcatcgacagctgggcgtttccgggttccatagcacactcacggttgtaggcatctgttggggagggcacctctgcgggtgctgaaatctttgcagctatccctaacgggacgccggtgggcggcttgccgtcacgcttgcaccgatctgtttccatatattgcaccggctttatgccggaagtcgcggtgttaaccttcaaaagcccgtgtcagggcatttcttacgatttaggccgacttttccttccgcgcgttgcgactgttcaacggcgtgcgcggaagtgggaaaagcgccagtaccctcaaggagcccctcgccatgcacgccatcagctttatccaggatttggccgtgatcatgctggtggcaggggtggtcaccatcctgttccaccgcctcaagcagccggtggtgctgggttacatcgtcgccgggttcatcatcggcccccacaccccgccgttcggcctgatccacgatgaagacaccatcaagacgctcgccgagctgggggtgatcttcctgatgttctgcctgggcctggaattcagcttgcgcaagctgttcaaagtcggcgccacagcgtttatcgcggcgttcctcgaaatcatcctgatgatctggatcggttacgaaatcggccgctggttcgactggaacaccatggactcgctgttcctcggcgcgatcctggcaatctcctcgacgaccattatcgtcaaggcgctcaatgacttgaagatgaagaaccagcgtttcgcccaattgattttcggcgtgctgatcgtggaagacatcctcggcatcggcatcatcgccttgctgtcgagcatcgccgtcagtggcacggtcagctccggcgaggtgttttccacggtcggcaagctctcgctgttcatgatcgtcgcgctggtcatcggcattttgctggtgccgcggctgctggcctacgtggcgaaattcgaaagcaatgagatgctgctgatcaccgtgttgggcctgtgttttgggttctgcctgctggtggtgaagctggaatacagcatggtgctgggcgccttcctgatcggcgcgatcatggccgagtcgcggcagctgatcaagattgagcgcctgatcgaacccgttcgcgacatgttcagcgcgatcttctttgtggcgatcggcttgatgatcgacccgcaaatcctgctgcaatacgcctggccaatcgcggtcatcaccgtagccgtggtgctgggcaagatggtgtcctgcggcctgggcgcgttcattgccggtaacgatggccgcacttcacttcgcgtggggatggggctttcacagattggcgagttttctttcatcatcgcggcgctggggatgacgctgcaggtgaccagtgactttctgtacccggtggcggtagcggtttcagccatcaccaccttgctgacgccgtatttgattcgcggcgctgatccgttgtcattgaagattgccgccgtgatgcccaagcgcatgagccgcgtgttcggcatgtatggcgaatggctgcgcagcatccagccccagggcgagggcgcgatgctggcgtcgatgatccgcaagatcatcctgcaagtgggggtgaacctggcgctggtggtagcgatcttcttcgccggcagtttctttgcggcgcgcattggcggctatctggagggatggatcagcgatccgagttggcagaaggcgttgatctggggcggggcactgctgttgtcgctgccgtttttgattgcggcgtaccgcaagctcaaagcgttgtcgatgttgctggcggagatgagcgtgaagccggagatggccgggcggcatacccagcgggtgcgacgggtgatcgcggagttgatccccattctgtcgctgttggtgatcttcctgctgttggcagccttgtcggccagtattctgccgaccaacaagttactggtgctgatcgccgtggtcacggctgcggtggcagccgtgctctggcggtggttcatccgcgtgcatacgcggatgcaggtcgccttgctggagacgctggataaccacaaggacacgccagagcactaatcgttgccggcgatggcggcatcaaaaacgctatcaccggcaagccggcgcctacaggatcgcggtgcgatcagctttccagccagacgtctcgcgcccagtgccacaccgattcccaggtttcttcggtcaccagttcttcttcgccggaccacagcaccacagtgccgtcttcttctacgcagtagtagtcatcgccgtcctggcagatcgggatcatgctgcgatcaacgccggcgtcccaggcattggccgcaacgtccggcaggtacgtgtgggactgcgggtcggtaacggtcaccggctccaggctgccatacactacgtcgctgacggtcagcagaaactcacggaacacaaagggaatgtcgatgaacagttgttcctcgatttccacgatctgatcttcatcaggcagttccagaggaaccggaaccggttcgttggcttcacgcaattgttcgatgatttcttccacggccgggatcctcttgctgatggcgcggttaacaggggcgttttatacagtagctcgctataagtgcaaccgtgaaatagaaaaccccggaacatgtccggggtttttattaccagtggctcaaacgcgcgggtatcagccgttctgacggataccggcgaccagccatggctggttctcgccttgcggacgttccatgttccagctttcgctgaacacttcgccctggtcgaaacgcgaggttttcgatacgccgctgaaggtcaaggtggcgatggtcttgtcggcgcggtcatccacaccgtccagctgtacgcgcaggtcgtcgatgtaagtcgactggaaggcatcaccgatctcggcacgttcgcgcttgaggaactccagcaattgcggggtcacgaactcggcaatcttgtccatttcgttggcgtcccagtgttgttgcagggactggaagtggctgcgggccgcttcgacaaaacgctcttcgttaaaccaggccggtgcgttgatcaccgggcgggctgcagccggtgcagccgaaccaccgaagatcgaacccatggccggtttttgctcgaacacttcacgctgcatcggcgcgccggcgggcgccaggtgctcctgctgcttgcggcgacgggcggcgataaagcggaagatcacgaaagcaatgaccgccaggatcaacatgtcaaagatttgcatgccctggaagccgccgcccatgaacatggacgcgagcaggccaccggcggcgatgccggccagagggcctaaccagcgcgaagcaccgccggccttggcagcagcgccagcggcaccggctgcaccagcggttgcggctgcgccgcccatgccaccggcggctggggccatttggctggtctggtggctcggcgctgcgccggagcttttaccgccaccgaagcgtttggcgttggcgtcaaggctcatcgtcaggccgatgcacaacgccatggcgatgctaagaaaacgtttcataaagggaattcccatttgtggattgcacgcgcgccatgttgcacaggtgtcgtgacagtggctagcggcagagtgtttcgggcttttgcgtaagaccgattccgaagggtctgtaggactagttacagatattggcccgccacctgtaaaaacaagggcgggccagtaaccttcatacagggaagatgtatcagattgcttcgagcttcgcgtagcccatcatcagccacttgctgccttcagcgaaattcacctgcacccgtgcctgggcgccggcgccttcgaagttgaggatcactccttcgccaaacaccgaatgcctgacctgttggccaaggctgaactgggtttcaggaatttcggagccggcgaacaggctgctggcgctctgttgctggccaccgccaaacgggcggctgacgctgttggacaagcgcacttcctggatcaggcccttcggtacttcacgtacgaaacgcgaaaccttgttgtaggtctcgctgccgtacaggcgtcgggtttcggcgtaggtcatcaccaggttctgcatggcacgggtgatgcccacgtacgccaggcgacgttcctcttcaaggcggccaggctcttccaggctcatcttgtgcgggaacagaccctcttccatgcccaccaaaaacacgtacgggaactccagacccttggcgctgtgcagtgtcatcagctgaatgctgtcttcatgctcgtcagcctgtgtatcgccggcttccagcgacgcatggccgaggaaggcggcaagtggcgtgaggtcttcttcgttctcggtgttttcgaacgcgcgtgcggcgctgaccagttcctcaaggttttctacccgggcctggcctttctcgcctttttccgcttcgtgataggcaatcagcccggactgttcgataactgtttgcgtcatcaagtgcaggggcatttccgcgcacttggccgcgaggttctcaatcaactcgacgaacacacccagcgcgctggccgcacggccagtcaggcctttattggcgaccagcaggcgcatggcttcccacattgatacatcggcgtggcgcgcgtggtcgcgaattgcttcaacggttttctcgccaatgccgcgcgccgggatattgatcacgcgctccagcgccgcatcgttgccacggccttccagcaagcgcaggtaagccatggcgttcttgatttccgcacgctcgaagaagcgctggccaccatagatacggtacgggatacgttcgcgcagcaaggcttcttccagtacccgcgattgggcgttggagcggtacagaatcgcgatatcgctgcgcgccaggccggttttcagcgcgctttcgatggtttccaccacgtagcgcgcttcatcgtgctcgttgaacgccgcgtacaggttgatcgcttcgccttcgccgccgtcggtccacagctctttgcccaggcgcccggtgttgttggcgatcaaggcgttggcggccttgagaatcccggcggtggagcggtagttctgctccaggcggatggtctccgcgtccgggaagtcttcggagtactggtagatattctcgattttcgcgccacgccagccgtaaatcgactggtcgtcgtcgcccaccaccatcaggctgtcgccgcccttggccagcaagcgcaaccaggcgtactgcacggcgttggtgtcctggaactcgtccaccagaatgtggcggaagcgtttctggtagtgcgcgagcaggcccgggttgtcgcgccacaggtcgagggcgcgcagcagcagctcggagaagtcgatgaccccggcgcgcaggcaggccgcctcgtaggcttcatagatgctgcgcatggtggccaggaacaaatcgccgctggcctggatatgttgcgggcgcaggccttcgtctttctggccgttgatgaaccattgcgcctggcgtgccggccagcgttgctcgtccaggcccagctcgcggatcacgcgcttgaccaggcgttgctggtcatcgctgtcgagaatctggaaggtctgggccaggcccgcttcctgccagtgcgctcgcaacagacggtgcgccaggccgtggaacgtgccgacccacatgccggccgggctgatgcccatcaactgctcgatgcggtggcgcatctcggcagcggccttgttggtgaaggttaccgacaggatggaatgcggggaggcgttttcgacctggatcaaccaggcgatacggtgcaccagcactcgggttttaccggagccagcaccggccaggaccaactgacggccaacgggggccgctacggcctggcgttgggcatcgttgagggagttcagcaaaagggagagatcatcgcgcatcggcgcattctagggtgcccgggggagtggggcaaataccaatgccgggtggtcggcggaaaacttcaacggcgcccgcagcggggcaaagattctgccgtgagggatgactggtcggtcatgctccgcagcccgcgccgcgtctcgctcaagctgtctggcccaaccgtttgcggttaaaagtcctacaggttttatgacctggggcagtttggcccaagcgcttgcttgtgtatgctccgtgcacgtttcgggctcaccattataagaacactgcctatgaccctcagtaccgacctgttcggcgcctcgagcgcgcccgcacaggtcattcgtaaacactacgcaacccagatggcggtcgaacgcactcggctgttgtaccaaggctccttgctgccgacgttattgatgttggtcaacggcctggtctgcgcctggttgctgtggaaccccaagcaatacctgctggacagcatctggctggtctggctgctggccctggtggcgatgcgcgtgatccaggtggccgcctttgattcggcgatgcccagccgccaggctctgccggtgtgggggcgcatgttcatgctagggtcggcggtcagtggcttgaccctggccaccgccgccatcgcgctggtgccggcggacagctttatgcagcaggcctgggtgttcggcctgatcggcgcagcgacgctgtcggccagcgtggcctatgccgtgagcctgccggcgttcctgtcctttgcgctgccgtgcctggtgccggctattgtctatttattctgggacggcaccccgcagcaacaaggctggggcgtgctgggcctgattttgctggcttcgttgagcctggtggcgtggcaggtcaaccgcctgatacagcgcgggctgctgaggcgtttccagaaccaggccttgatcgagcatctgcagcaggcgcagcagcgcagcgagcagttgaatcaggagctggtacgcgaagtcgaacagcgtcgccacgtcgagcaggacctgcgcgacgcgcaaatcggcctgcaggaccgcgtggcgcaacgcagccaggaactggacgccgccagcctggccttgaacaaaagcgaagcgcgcctggccatggccctgcaagccagtgaattgggcctgtgggattggaatctgcaaaccgacgaagtccatcacacccaactcaaggagctgttcggcctggagcctgaatacgtcacggcgatgctcagccacctcaagccgcgcctgcatcccgaagacttgccgctgctcaagcgtgcactggtggaacacctgaaaggtcgcagcgaggattaccaggtggagtaccgcgtacgccatggcgacgggcactgggtctggattgaagaccgaggccgcgccgtggagcgcacgccgagcgggcgggtcacgcgtatgctcggcacacgtcgtgacatcagcgccggcaaggcgttggaagaacagcagcggctcgcgtcgaccgtgtttgaagccgccagtgaaggcatcgtgatcctagacccgaactacgtgttgatcgccgtaaaccaggccttcagccgtgtcaccggctttgaaatcgacgacatgatcggtcgcaacgtcgttgagctgcccagcagccgcgacgcccgccgccatttcccggtaatccgccaagcgcttctcagccacggcacctggcagggcgagttggtggaaacccgtaagaacggcgagctgtacccgcaatggctgcaattgaatgtagtgcgcgatgtccgggggaaagtcagccatattgtgggcttcttcgccgatctgtctgcgcggcgtgaatccgaagaacgcatgcgctacctcacgcactacgatgaactgaccgggctggccaaccgttcgttgttccgcgaacgcctgcgcgaggcccatgcgcgcgtgcgccagggcgggcgtagcctggcgctgctgcacatcaacctcgatcgtttcaagttgctcaatgacagcctgggccacgaagtggctgatcagctgttgcagaaaatggcacgtcgtttgatcaatgccttgcccgaggccgacacgattgcgcggatgtccggggatgaattcgcggtgctgttcgatgcttacggtagcctttccagccttgcgcgagtggccacgcggttgctcgccaaactgcgcgtgccggtgacggtggaggggcatgagctggtggtcagcgcctcgatgggcgtcagcctgttgccagacaacgcgcgggaaatttccgcgctggtgagccaatcaaacatggccatgcagcacgccaagcatttggggggcaataacttccagttcttcaccgacagcctgcaagccagcaccctggagcggctgcagttggaaaaccacctgcgcaaggccatcgacgagcgccagctcaccgtgttctaccagccaaaactgtgcctggccaccggcaagctgaacgctgccgaagcgttgattcgttgggaccacccgcaatggggcatggtgcctccgggggactttatcggcctggccgaagagaccggcctgattgtgccactgggcgaatttgtactgcgccaggcttgctggcaggcgtgcgagtggcagcgccaggggctggcgccgattcgggtgtcggtgaacctctcggtgcatcagttgcgccagggcaagttggtcagcctggtgcgccaggtgctcgaagaaaccggcctggacccgcaatacctggagcttgagctgaccgaaagccaattgctcgacagcgtggagcacatcatcgccaccttccagcaattgcgcgacctgggcgtgaagctggccatcgacgatttcggcacgggctattcatccctcagctacctcaaacgtatcccggtggactacgtaaaaattgaccagacgttcatccgtggtctggggcaggggcgtgaagacgccgccattacccgcgcaatcattgccatggcccacggtctggcgctcaaagtggtggccgaaggcgtggaggatcagcagcagttggacttcctgcgtggtgagcgctgcgacgaggtgcagggttacctgatcagccgaccgatgcaggccgaagggttggcagaattgttacggaaaaatgcagattttccttgaggttggccggggcgcctttatggctacatggcgcctgcccgctgaatcagtgggcatcagggcgatttagtgatgcatcggacgggcaaaacgacaattcttgtagtataactacaagcttgctacatccctggcgtctgccaataacaagagtcctgccctttgaacctgttgcaacatatcgcccagtcgcgccacctgttacgcaaatcggaactcaaggttgccgatcacgtgctgcttgaccctgcggctgtgatgcacagttccatggccgacttggcccacagcgtgggtatcagtgagccgaccatcgtgcgcttctgccgcgccattggttgctcggggttccaggacttgaaactcaagctggcccagagcctggccgcgggtgcgagcttcgggcagtttgcgattcatgaagacgattccgtcgccgattacagcctgaaaatcttcgacaccaccttgcacacgctgatggaagtgcgcgagaagctcgacccggtggagctgcaaaaggccgtgacagcgatgtcccaggcccagcgcgtcgagttctacggtttcggtgcctccggcgccgttgcggcggatgcccagcacaaattcttccgcctgctgctcaccgccgcggcgtacagcgacccgcacatgcaggcgatgtcggcggtgaccttgaagccaaccgacgtggccatctgcatatcccagtccggccgctccaaagatctgttgatcaccgccaatctggtgcgtgaaagtggcgcgtcgctgatcacgttgtgcccgagccagacgccgttggcggagctgtccacggtcaacctggcgattgatgtgcatgaagacaccgaaatttatacgccgctgacttcgcgcatcgcgcacctggtggtgatcgatgtgctggcgatgggcgtggcgatggcgcgtgggccgagcctggtcaaccacctcaagagtgtgaagcgcagcttgcgcagcctgcggttgtcacccaagtccgtcaaagccctcgacgactgatccaaggcttcacgcagtcaaaatgcgggagctggcttgcctgcgatagcggtggatcagccagcacatgcagtggctgacagaccgctatcgcaggcaagccagctcccacagtagttttgcggcaatgttggaatattcatcgtcctgtcatccccgcgccgctaaaccgtaaccccccaaggccatcctgtactccccgtactcgcattgggagactcgaaatgacccgtccctacgaagacagcaacagcgccgtaaaaactcgccgtcagcaggaagaccagcgccgcatggcgtttcgtcgcgccatcgaagaccgttgtgaagagcgccaattgctccagagcatcagtgactacccggaactccattggcaggcacccgcggctgcccagcgaaacgctcagccagtgcgctgatctgcacccgttcgctgcggataaagcccaggaacgcatgggccaccggtgacaggcgcttggccttggcttgcaccaggcaccaactgcggtacagcggcaattcttccaccggcagctccttgagcccgccggtggccagctccaggttgaccgcgtggcgcgtcagcaacgccacgcccaaccctgcgttcacgcattcacgctgcgcctcggctgaggccacttccaccgtctgggtgaagtgcacgcgtttctccttgaaatactcctcgcacgccagccgtgtgccggaacccggttcgcgcagcagcagcgtgtagggttccagatcctgcaggcgcagcggcccttgcaggctcaagggatgatccggcggcgccacggcgatgatggggttgttgaggaacggcaggaattccagccccatgtcctgggggaccatcgacatgatcaccaagtcatcacggttgtcggaaagccggcgaatcacctgcgcgcggttgaccaccgtcaggtgcaattgcacctcggggtgctggcgcttgaaagcggcaaacaggtgcggcacgaagtatttggcgctggattccaccgccagtttcagctggccttgcaacgaaccttgcatgtccgagagctgcatatcgaggttttccaggcgcccgaagatgtcgcggctggcccgttgcaaggcttcggcggcctcggtcatgtagagctttttgccgacgtaatcgaacagcggttgcccgatcagctcttccagctggcgaatttgtaggctgacggccggttgtgtgagagacatttcctcagcggcacggctgtaggagcgcaaatcacagacttcattgaaaatctgcaattgacgcaatgtcatacgcatcaatgacttacgcattatccaaccccttctgccagacaccgtggcatcaactataagtctttacttatacacgacccaataattattgatttttgttaatccttcggtgcgcatagtgtgtgtctcgcgactgtcatgaaacatttggtcacgcgccgacccggatccagggggtcgtagaacgcagcaatcggctcaagggaatttccaagtgataaaaaagatcctgatcgccaaccgtggtgaaattgccgtacgaatcgtgcgtgcctgcgccgagatgggcattcgctcggtcgcggtcttttccgacgccgaccgccacgcgctgcacgtcaaacgtgccgacgaagcccacagcattggcgccgagccgttggccggctacctgaacccgcgcaagctggtgaacctggccgtggaaaccggctgtgacgcgctgcaccccggttacggtttcctgtcggaaaacgccgaactggcagacatctgtgccgaacgtggaatcaagttcattggtccgtccgctgaagtcatccgccgcatgggcgacaagaccgaagcgcgccgcagcatgatcaaggccggcgtgccggtcacccccggcaccgaaggcaacgtcgccgatatccatgaagcgctcaccgaaggcgaccgcattggttacccggtgatgctcaaggccacttccggtggtggcggtcgtggtatccgccgttgcaacagccgtgaagaactcgaacaagccttcccccgtgtcatttccgaggccaccaaggcgttcggttcggcggaagtgttcctggaaaaatgcatcgtcaaccccaagcacatcgaggcgcagatcctcggcgacagctttggcaatgtggtgcatctgttcgagcgcgattgctcgatccagcgccgtaaccagaagctcatcgaaatcgctccaagcccgcaactgacgccggaacagcgcgcctacatcggcgacctgtcggtgcgcgcggccaaggccgtgggctacgagaacgccggcaccgtggagttcctgctcgccgagggcgaggtgtacttcatggagatgaacacccgggtgcaggtggagcacaccatcaccgaggaaatcaccggcatcgacatcgtgcgtgagcagatccgcattgcgtcgggcctgccgctgtcggtcaagcaggaagacattcagcaccggggtttcgcgttgcagttccgtatcaacgccgaagacccgaagaacaacttcctgccgagcttcggcaagatcacccgttactacgcgcccggcggccccggcgtgcgcaccgacacggcgatctacaccggctacaccatcccgccgttctacgattccatgtgcctgaaactggtggtgtgggcgttgacctgggaagaagccatggaccgcggcctgcgcgccctggacgacatgcgcctgcaaggtgtgaagaccaccgccgcctactaccaggaaatcctgcgcaacccggaattccgcagcggccagttcaataccagcttcgttgaagcccaccctgaactgaccaactactcgatcaagcgcaaacccgaagagctggccctggccatcgccgccgccatcgccgcccacgcaggcctgtgaggaatattccaatgactaaaaagatcttcgtaaccgacaccatcctgcgcgacgcccaccaatcgttgctcgcgacccgcatgcgcaccgacgacatgctgccgatctgcgacaagctcgacaaagtcggctactggtccctggaagtctggggcggcgcgaccttcgacgcctgcgtgcgctttttgaaagaagacccgtgggagcgcctgcgcaaactgcgcgccgcgttgcctaacacgcgcctgcaaatgctgctgcgtggccagaacctgctgggctaccgccactacagtgacgatgtggtcaaagcgtttgtcgctaaagctgccgtcaatggcatcgacgtgttccgcatcttcgacgcgatgaacgacgtgcgtaacctgcgcgtggccatcgaagcggtgaaagccgccggcaaacatgctcaggggaccatagcctacaccaccagcccggtgcacaccgtcgaagccttcgtggcccaggccaagcagctggaatccatgggctgcgactcgatcgcgatcaaggacatggctggcctgttaacgccgtatgccaccggcgagctggtcaaggcgctgaaagccgagcagaccctgccgattttcatccactcccacgacaccgctggtttggccgcgatgtgccagctcaaggccatcgaaaacggtgccgaccacatcgacactgccatttccagcttcgcctggggcaccagccacccgggcaccgagtcgatggttgccgcccttaaaggcagcgaattcgacacaggcctgagcctggaactgctgcaagagattggcctgtacttctatgccgtgcgcaagaagtaccaccagttcgaaagcgaattcactgctgtcgacacccgagtgcaagtcaaccaggtgccgggtggcatgatctccaacctggccaaccagctgaaagagcagggcgcactgaaccgcatgagcgaagtgctggccgaaattccgcgtgtgcgtgaagacctcggcttcccgccgctggtgacgccgacttcgcagatcgtcggcacccaggcgttcttcaacgtgctggccggcgagcgctacaaaaccatcaccaacgaagtgaagctttacctgcaaggcggctacggcaaagcgccgggcacggtgaacgagaaactgcgtcgtcaggccattggcagcgaagaagtgatcgacgtgcgcccggccgatttgctcaagccggaaatgaccaagctgcgcggcgaaatcggcgcgttggccaaatccgaagaagacgtgctgacctacgcgatgttcccggacatcggccgcaagttcctcgaagagcgcgacgccggcaccctggcgccggaagtgctgttgccgattccagaggctggcggcgtggcccgtgcaggcggcgaaggcgtgccgaccgagttcgtcatcgacgtgcacggtgaaagctaccgcgtagacatcaccggtgtcggcgtgaaggccgaaggcaagcgccacttctacctgtccatcgacggcatgccggaagaagtggtgttcgaaccgctcaacgaattcgtcagcagtggtggcagcaagcgcaagcacgctaccgagcctggccatgtcagcacggcgatgccgggcaatatcgtcgacgtgctggtcaaggaaggcgacgtggtcaaggccggccaggctgtgttgatcaccgaagccatgaagatggaaaccgaagtgcaggcagcgattgccggcaaggtgaccgttgttcacgtggccaagggcgaccgggtcaaccctggcgaaatcctgattgaaatcgaaggctgatccagccttcgacactaccgtttaatcctcgggggggcaggtgccccccttttttttaacttgcatatccaaccctggctgcagaccccgcgaagtaagggttgaaattggcacccacgttaagactgaccggcagcccaggaggtagcagcgataccctgacacccccgaaggcgtcagcacgtacgcccggccctgcggaaatactatgtttcggcgcggtgtattttgaagtgtcagtgctaaatgtgacggaatgttgaatgttaaaagtaggggctatacttgccccgccattcacttgtaccgggccggcctggacgtttgcggtggcactgcttcttgagacgaaagtataactattggtaacggttaccgttttatcgttattaaatgatacttgtgggtctttgttgggtgtcacggtgtagtcgagaccgggacctcctgctcttattgtttgcgctgtttcatgggaaaagctctggcttatgccgccaccgatgtcgcccacacttgcctgtgccccgccgttcacgttagcaatttgagtggtcgttaacgtgggggagaagtttgcgttaaatttgatttcgccatttagctttaaggtagtactgaactccggagcgctgacagtgatcctttttattacgccggcccctgcgttaacacccacgcccgttcccaagatgtttggaatcccaatgctgcccgtaccgctcaattcgaactgcatattcggcctgacgctggcacgcaggtcgccgctttctgtgacactcagggttatagcggggtcaaatcttaccgttttggttaccccgagattgacgccgggaatcggtgtgaggcctgcagaaataaagacattcgttctagggataaacgtgagcgtcgggaggggttgaaatgacgctttcccgcctggaacgttcgctgtatagggcgcgagcggcgaatgaggtgtttgattgtttatgggatcttgcggttgcggggcggaaggctgataggttggatgtgaagaaactgtattcatgatatttcacctttagtcagtattttatctttggcggtgcactgtttttattaagtggtgctgtcccgcctatacatctatctaaacttgcagagcgctctatagatgtacaaatactgtgtggggtgaatagtttattggttccgttcaggaacgactgccgatagataagtgttttcttcgctgttttaaaaagagtctcattgacagatgaatgttggatgctgaagtgttgggtgacgagggataaagctgacgaagaattacaaaacattaagccggactaagtgctggatggctgcttatcgatgttcaggagatcaaaagcgcaggttaattaatttcggccaaactctgatccaggtcgaaggctggtcaagccttcgacgatgccgctgaatccttatctcagaggctttctttccctggcgtccaattcaaccctgttaaaaactcatctgccattggccgaccaaggcgtggttgcggctgttgctgccgatctctccggtatagcccaagcccaggctgtgacgagctgacaggcctacatccagcccggcttcgagcaacaggctgtcgcgatccaaagcgctgccctcgacgttgaacgctgtaccgccagcgaggaaggcttggcgggtgctgctgtcgacgtcgccgtaggtatgtttccagccggcgctgacccgtggggtgaggctgatgccattgtccaactggctcaagtgcgccaggcgcaagccgaatgtgctgctgaagttgtcctgggtctggccgtccacgtgcagcgcagcggcgccgcctttctcgttgtagctgtcgcgctgatagcgctggtagccgaggctggcgaacggctcggcactcaggcgaccgctgcccaaggcgtaacccagttcggcgaaggcttgttggctgttggcgtcgtagtcgcctttgggacggtcgttgaaaccgttgaaggccacggtgcgtttgctgtcgccttggtggccgctgtaagccgcgccgaggcgcagggccaagggcccgctttggcgcatcgcgtaaatgccggcgtgccagctgtcgacgctgccgtcgacgccggtggtgtccaggtcggtcttggaatagccgcccagcacgccgacacgccattcgctgtccagcgcccagtcggcgccgagcactgtgcccttggtgcgctgggtcaggccattgctgccgtgctcaccgtccagcttgccgtagctgccgatgccttgcagccacaggcggccgcgtgcgttggggtcgttgaggttgcgcgcatcgctcggtacgccggtggcggcgagtacgggcgtgtctttttgatcgagccccaccagcaagcctgcgccgccacccagttgatgcatcgccgccagcatgctgttgcccacctgggcactggcgccgagggtcgcagcggtcaggttcgcggtgctgctgcccgccaattgctcgatggctgcgcctgcggtggcgttggtggtgttgagcagggcgttatacaacgtgctgtttttacccaggcttgccaggctgttggcggcgttactgccgttgccggtgctggcgaactgattgaagttgacgtcgttgcgtgtgtacgtcaggccaacctgcgttgggctgtaatccagggtcggtgtgaggaacgcgtagtcactggtgacgttgccgaatgtgccgttgatgctgccggcttgcagcacggtgtaatggctctgccatgggtaagtgccggtgcccgggttgaccgccagcgtggcaccgttgaggtaagcggtgccgccgacctgaaccggcgcgctggtcccgtcggcgttaacgccgtaggccagggtcgagccgctgccgaaggtcaggtcgcgagtgatgctcgcggtgcccaaagcggtgttggtctgcaaggtgccgttgaccagcaggctgcccaccgagccgccgccggcatagataccgcccgcgtctaccgtcacgttacccgcgatggcgccctggttgatcagtttggcgccgctgaaaatctcgccgccgtcgctgaagtcaccctggctggtgagggtccaggtgccttgtttcacgtccagccattcgaagttgcggctgttgccgaaactgccgccggccgggtcgtccatggtcacgcggtcatagcctgcgccgccgtccaccaggccgacaaagcggctgccaccgagcagcaccagtttgtcgtcaccaccgcccaaatccagcgccaggccgttgctgccgctgatggtgccgccgttgatcactgtgtcggcaaagttgccgacgaacttcacgccaaagccgttcaggccctgaatggtgccgtggttttccaaggtggttgccgcaacgcccgggccgtcgctgccgtcgtccaccagcaccgcgttgttggcgccgctgaccagggcgccgctggcgttgtacacatagccgccgccgagggcgatgccttcgctgccgttggcaaagccgtttttgtccacgccgcctgcgccgacgccctgaatgacgccgtagttttcgatgtgggcgattttgtcgatgtccacgccgtcgccgtcgccatccggttgcaggccggagaatgcgccggtgatggtgccgtggttgattaccgtaccgtcgccatcggaaccgaagcccgaaccattgcggccgatcacggtgccgtagttggtcagcgtggcgccaaggtcagtggtgatgccgtggcggccgccggaaatcaggccgtagttggtcaccgtcacaccggtggcagagtcgatatccacgccgtcgaatttgtcatcgcgggagaacgtgtcgcctgtggagatctcgccgtagttggtaatgctggcattgccgccggtcttcatgccgtcgctggcatcgccgcgaatcaggccgcctgcgcggttgatgattgtcgtggtgacattgctgctgcgaatcgcgtccaggtccagcccttggccggtggccgagcgaatagtgccgctgttgtcgatcaacaagctgccgctggcaaagttgctgttgatgcgcaacgcgtcattggcgccctggatcacgccgccggcgaggttgtagatgctgtagttgcgcgccccggtcagggagcccgagctgtcgatgccacgcccgccgctggaaaccagcttgcctgcgttggtgatcaccacgcccgcgccgctggtgccgtccttcaaggtcaccgccacgcccggcgtggtgatgctgcccgccgcggaggtggtcaacgcatcactgccacccagggtttgcccggtggtggtgggtgtgttgatttgcaggtttttcggcggggcagtggccgcttcgacgaagccgctgctggccaataaggtaatggcgagcgcgaggcgatggggagacggggacatggcaggcgaccttgttataagaaacgaggcgacctgtataacgaaggagggttgcaggaatgtgtcgggaacatgacagggtggccggacgcaaagtccgaagtgagtgaagatccaatgtgggagcgggcttgcccgcgatagcggtgtgtcagcgatacagaagttggctgaagaatcgctatcgcgggcaagcccgctcccacagtgatttaaggtgtttggggaattcaggcccggcactgcgccagcgacttcagttgcccgtcaccgctttgattcgcctgcgacaaccattcttcaaaccccgcgccaacctttggccattcggagtcgagaatcgaataccacgcggtatcgcggttatggcccttgaccaccatgtgctggcggaatacgccttcaaaactgaagcccaggcgctcggccgcgtatttggagcggccgttgccgttgttgcacttccactccaggcgacgataaccctggtcgaacgcgtgcttggccagcagataaacggcctcggtgcttttcggcgagcgctgcatcggggcgccgaaggtcacgtggccgatttcaatgcggccctgggcaggcacgatggacatcaagctcaggatgccttgcacctggccgtttgcgcggtcgatcacgctgaaaaagtacggatcgttgtgagccgcgtgattgttcagccaagcatcaaaagcggcacgctcggggaacgggccatacggcaaataatcccacagtttcgggtcggcaccggggccttgcagggcctggaacaagtcgtcggcatggcgcgcggggtcgagtttttccaggcggataaagcgcccttcgagcactgtcacggtcggtgcggggacgcctttccagtcggcgagggaagtggacatgctgcgctccttaaagacctttgcgaaattggatgaaacccgggcgttcggcgatgcgttcgtacagctggatcgccgtggcgttggtttcgtgggtcagccagtgcaccttggcgcacccatcggccttggcggtggcgtagacgaattcgatcagtttgcgaccgacgccggtgccgcgttgggccgggtccaccagcaaatcctgcaggtaacaggagttctcgatgctccagttggaacggtggtaaatgaagttgaccatgcccaccgccttgccatcctgccaggccagcgctgaatgggtcggctcgctggcgtcgaccaggcgctgccaggtgctttggctgacggcgtccggcagttcggtgttgtagaacttcaaatacgtatgccacagcggcaaccaggcggcgtggtcggcggcggtgacctggcggatgtcgatctgactcattctgaaactccttggggaataaagcgcgcgagggtctggtcgcgcacgtcgaggctggcggccaggccgtcgcgtacgccagcgatgtccgccgggctgcggttctggctgagtttgcgtttgccgatcagccgctcgaccggcagggcgaagccgacgatagctttgagcatgccctcaatgtagtcggcgggcgcgtcgctgactttccacggctgggcgcggccaccttcgtggcggtcggtcagggccgtgaccacgccgagcaagcgctctgcgtcgctgaatacctcggccttgccgtaggcatgcacggcgatgtagttccaggtcggcaccactttgccgtgttcggccttggccgggtaaaacgccgggctgatgtaagcctcggcgccggcaaaaatcaccagggcttcgcttccattttgcaggtctttgcactgcgggttggctttggccaggtggccgtacaacgtgccgttcgggccttcgtcggggttgagcagcagcggcaagtggctggccatcagcccttgctcaccaaaggtcaccaactgcgccaagcgggtgtgctggatcaattggtgcagttcgggcaagtcgtcgagagcaaaggcgcgtggtgtgtacatggaaatattccttggcgaatgcctgcatcctaggcaggctaatggttcgttgaaagagccatctggcacccatttcataggtccaatatgtcgcccatcacgccaccgctgtcgttcaaccctgctggaatcgaactggatcgccgtcaggggctgacgcgccaactgtacgaagccttacgtcagcgcgtgctggacggacggctggtcagtggcacgcgattgcccgccagccgtgacttggcggcggcgttgtcgatctcgcgcaacagtgtggtgcgtgcctacgaccagctgtatgccgaagggtttaccgaaagccgggtcggtgatggcacttatgtggcgcaactgcccacggcaaaaaaactatccacaaaaccatccacagggttatcaacaggcttatccccagctttatccacaaaatgggtcaatttaccggaagatctcgaccatgaagttatccacagcggcggcttggcccggataaaaaccaaccacttgtcactgccgccagcggggccgccacgggcatttcgggtgggcgtgccggcgttcgatctgttcccgtttgatgtgtgggccaagctgaacggggcgttctggcgcaaaccagaccttgaactgctctgctatggcgacccggcaggcgatgctcgtttgcgtggtttgatcgccgcttatttgcgcagctcgcgcggcatgcagtgcgcggctgaacaaatagtgatcaccagtggcgcgcagcaggcaatcagcctttgtgcacagttgctggtggagcccggcgatggggtggcggtggagaacccaggctatcgcgcagccgggcatgcgtttgcattggctggcgcaaaactgcacggcgtgccggtggacggcgagggtattgattgccaggtgctcaacacgctggaggactgccgcgtggcgtatgtcacgccgtcccatcaatacccgctgggggtggtgatgagcctggcgcggcgcctggaattactgacctgggccgagcgcgcggggggctggattatcgaggacgactacgacggcgaataccgctatagcggcgcgccgctctcgcctttggccgctttggaccgtagcgggcgggttctgtatgtcggcacgttcggcaaggtggcgtttcccgcgttgcgcctgggatatctggtgttgcccgcagggctggtggatgcgttctcccggcgccgtgccgtggacatgcgccactccgaagtcagtacccaggcggtgatggccgagttcatggcagccgggcattttcagcggcacattcgccgcatgcgccgcgctgcactgagtcggcgcaatgccttgctggccggctggcctggcgggttgccggggatgggggcgttacccggcgtcgcggcagggctgcacatgacggtacgcgtcgacagcctggcccgtgagcagcaactgcttgaacaagcgcacgcggtggatgtcgagatcaacggtttgagcagttactggctggcagactcgaccacccccgaggatcagcgcgccgggctggtcctggggtttgccgctgtgccggaagcgggcattgcgcaggcactggcgcggttgcgccaggcctggcaagcgtcagtcaagaaagtgtgaagcagctccaactcttggctggaactgctgcgcagtccaacgggagcaagctccctcgccacatgtacggtgccggcccgaatcaagtgcctgacttgatcttggtccaggcccgtgttctggcgcgctccgcatcacgccccaagggtttgagggtgtagagcgtggccattgcggcctcggtcgggtacaggttggggttgttgcggatcgacggatcgacctgttcggtcgcgtccttgttcgggttggggtagccgacaaaatcgctgatcggtgcgatcacctgaggttgcagcaggtagttgataaaggtgtaggcgtcctgcgggttctgcgcgcctttggggatggcgagcatgtcgaaccagatcggtgcgccttctttaggcaggcgcatgtccacggttacgccgttcttggcttccttggcgcggttggcggcctgggaaaaactgcccgagtaaccgacggccacgcagatgtcgccgttggcaatgtcggccatgtatttggacgagtggaagtaggtgatgtaggggcggattttcatcagcaaggcttcagccttgacgtaatccttggggttgctgctgttggggtccaggcccaggtgctgcaacgccaatggcaggatttccgagggcgaatcgagcaaggccacgccacattgcttgagcttgctgatgttctcttccttgaagatcaggtcccagctgtccaccggtgcattgggccccagcacggccttgaccttgtccgggttgaagccgatcaagatggtgccgtacatgtagggcacggcgaatttgttgccggggtcgttggcctcgatcagcttcatcagcttggggtcgaggtggttccagttcggcaactggctgcggtccagcggctggaacacgccggcttcgatctgcttggcgaggaacacgttggacggcaccaccacgtcatagccggagttgccggtgagcagcttggcttccagggcctcattggtgtcgaagatgtcatacaccagcttgatcgccgggttttgcgccttgaaatcttccagcgccttgggcgtgatgtagtcgaaccagttgtagaccttgagggttttttcttcggcctgtgccgcgccgctcaacacggcggcgcataaggcgagggaggcgagcatcttcatcgggtgactccttccagttcgaaaccttcaaggacgttgacggcgttgatgccgatttcttcgacggcgtagccgccttccatcacaaacagggtgggcttgcccaggcgcgcgaggcgttggcccatggccaagtaatccgggctgtcgagcttgaattgggaaatggggtcgtccttgaaggtgtccacgcccagagacaccacgatgatgtcagcgccgtagcgttcgacctctgcgcatgcctcttcgagcgctgcgctccattggtcccagcccgagccggcgggcagcgggtagttgaagttgaaaccttctcccgcgccttcgcccagctcatcggcgtagccgaggaagaacgggaattctgcctccgggtggccgtggatcgaggtgaacagtacgtcgctgcgctcataaaaaatcgactgcgtaccgttgccgtggtggtaatccacatcgacgatcgcgactttcttgtggccctggtcgagaaacgcctgggcggcaatcgcggcgttgttgaggtagcaatagccgcccatcaagtcgcctgcggcgtgatgcccgggcgggcggcacagcgcgaaggcactgtgggcgcctgcctggattgcctgctgcgcggtgagtgccacttgcgccgcgctgtacgccgcttgccaggtgccggcggtaatcggcgcgccaccgtcaaagctgtaatagccgagctggccgtgcaggctggtgggcagtacgcgacgcagggtgcgggcgggccaggtgtaggggagcaagtcgccgtcctggccaaattcggtccagcgcgcccaggcgcctttgaagaaatctagataatcgcggctgtggatgcgttgcagcggggccagcccgaaatcctgtggcgcctgcaccgggccgagttctcggtctttgacccgttgcagtacatggtcggcgcgcgagggcatttcgaagcagggcatcagttgcccgtccatcagttcacagcgtccatggtgcaagtggtgatcgtcggagtagatcgtcagcatgggtactccccgcaggcctgttgttgtgcctcgcagtgttgcgtcgtggggagttcaagagaatggcaggagcggccagaaggggataaatatggccaaagtaagtgaccgtaattcgccctttaatggcgcatcaggctaggcgccacgccactccagcgcacaaacgcatggcgaaaactcgccgtctcactgaagcctagctgttcggcgatctgatgaatgggtaactggtcgtgtgccaaccagtgtttggcccgctcaaagcgcagctcgtcgagcaattgctggtagctgcaccccaacgcctgcaagtgcctgcgcaaggtgcgcggcgagcagttcatctgcgccgccaagccctccaggcctggggcggcatgcagttgatcggcgagcaactggcgcacgcggttgagccaggcctggcgcccggtgaattccgagttctgtttgcggcagcgctcggtcatggcctgatgggtgatggcatccgccagcggcaggggttgttgcagccactgtgggtcgaaggcaaacccgctggtcatcgcgtcaaattgcagcgggcagtcaaagcgctcggcgtaacgggcgtggtaatccggcgcgggataatcgaagcgcgcctcacgcagcggcagcgggcggccaagcaagtcatcacagatgaccttcatcgacaccaggcaaaactccacattgaacgctgcgagctcggggttttcccggtagtcgccggcggtcagccagatctgcccgccgtcttccaccaggctgagctcgaaaagtgttcccaacagcgccgggtagcgcagtgccaggcgcaaagcgtcacctaaggtggcactggtgagcaatgcatagccgagcaaaccgtagcacgacacatgcatgcgctggcccagttccaggccgatgtcctggcgcagggccacggcattggcgcacacgcgcatctcctggcaggtggtgatgcgcgtgtcggcgcggtttagatcggccacgccaataccgctgccggccagcagtacgtcgctcgccaagccttggtccttgaaggtggccaagaccagagacacggcgttgagagtcgtcaggtgtgaatgcagcatggggaaaccggcgccagtgggtgtggcagtggtgcagcaagttacatgccgtctgcgtgctgtcgatcaggtaccggatgtggattttggccgatcgaaaaatagttcccgggcctgttccaggctgatctcgctgcggtagaacgcgatcatttgcgtcggggtgaggccttgaggcgaatcagcaggggcgcccaaggcatgttcggctggggttttcaggcgggcagacaggtaggctttgtccggcgtccagtgggtgctgtagtgaaaatgcgcgtaccaaagcaccttgctattgccccggtcaacgaccgtgtactcatccaggaagtccggcttgacgcctttgattcggcggcgagtctcggtctttttgatggtgatcacgttgtggcgcttgagccattcaataccgggcacggtgggtgggtaggccttgagcgttctctgcaccaattggttgctctgttggtagagatcggccaaggctgtgtcgaggcttttgatcatggcgctggcggaggtcgacaaggtgtcgctttcggtgatgttgcgttgtgtcagggcctgctcaatggcgctgatggctttctccagccaccgggcatgttggtgatacagatattcgatgccaaaaggtgcgcggtcggcgaggttggcgtgggttctggcccgtgtgcgaaatgcgggtaacccatccagcagggcctggccttgattgatgcttagctgcaggtccacggtggccggttcgccggaggggggtggagttcgatcgtgcaggacccagacgcccttggttttttcatggtaggtggccaatacctgattggtcagtggtgagcgaatgtccacgaagcccgtctccaggccaacgctgctcaagcgcggctcgccaatcagcaggccgttgtagcgggtgtggataaactgcctgtgcgggcgcggcggggtcgaaggcggagtggggcggcttctgaacaggcttctttcggcgctcagcacgcgcaggttagtgatggcacgtcgctggaagtcagtcagctcctggcgcaactcgagcaactgatcgttgatggcgtgttcggagaactccacggggaaatcctgcaagcgctcgtcaatcaattgaaactgctcgatcaggttgctcaacgtatcgatgcgctcgtccaagcgtcggtcgctccgctcctccagcgtgtctcgcaggcattggatggcgacgtcggcggtgtcgatgatccggtcgatctgcgcccaggcttctggttgtgtgacaagagtgtgctgcggcaggcaaaggttgcggttgagtgttacgcggatcgctttgaggtcatcgagcgtgtagaccggcattgatcctttcagagtattcaagagcagcgcgccttctctggccaggcttctgagctcttcaaagcggccatgcatgtattccaattgaatgatcagcctgccagccagatcgcgcatttcgcgaaagtcttcaattcgccgtacgtgcggtgtttcgacctgcaattgcagttgctcgtgaatgctgcgccatttgggtgtgaaccgggcgaggagttcgcgaagcgctgcttgggtcattttggcttgggctttgatgtagctgagggccttgggggcgtaatccgcgctgggttggttaacattcatctctttgagcatttgcagcgccgactcgtattccgaacgctgggtttccagggtctggatataggttcgccgaagcgcttcggcggacgtagaggggccttcgtccaatgcgctgcgagcctgttgcaactcaccttgtgcggtccttttccgactttcgaagtcctcaagttgctttcgcaactcatcggctttcttctttgcctgctctcgggctttctgagtcatgagtttggggccgccgccacgcaagcgcaggcgcgtatcgacaaaccattgccccccgctgttgtggatcaagggtgggccggtgcgctcggggtgggcggggtcgttgatcaagacggtatcgttttcgtccaccagtacctggaaccagcgctcgcccacgggggcgtaccagtgctcgccaccgcgatacagatgccgatgggcccctgcctcgctgttgacctcgccgagggtggcgggcctgggcactttgaaactgtccagcacggtggccagtcgcactggtgcgcgattgacggcgccgctgatatgcaggaggcggccgtggggcaccagagtgtcggagctgacagtcgcaagctttgtgacgacctgtggctctagctgggcgggcgggcggggtaggggcaagggatcttttctctgtgccaagcctggcgagcgatgggtgacgcaatgcaaggtaatcgccatgccgatgttcaacagcaggtcggcgagggcagaccagggcgactcgtgttcagggtgagcctgggcgtcgaccacaccttgcagttgatccatgatctgccagatccaggcggccgtgtttacggtacgcccgagaaatggcaggacagcattgaagagtgcccagccgacacgcttgaaagtggcccagcgcgcttcggcgttggacactgaatggcgctcggccagcgtcacaagggcgttggcattggcgttgtacagtgtggcgaacagatcgccggtcagcgtgtcctggcccagtttcaccggcccgctcattgccaaggcttcgagcgggtccaccacgaacgtgagtaccgcccaaggcgagggcaggtcgccagggaacacaaattgggcgtactcgtcgcgggtgccgtcgggaagccaggccaagacagaatcacgcaggctgtcggactgttgcagggcgtacagcagattattcggtgacgggaattgcgacagcggtttgtcgagcagtggccggtacagcaagcaagggccggcgctcatgtcctgggggccgatcacgaacatgttggcgaccacatccggagtcgtgtccaggcgccgagtcggtacaaaggccagcgggcgaatcacgatcaactgcccctcaacctggcgggcggcgggagtggcctgcatcagtgcggtgatgtagcgatagccttgctcgtcgatcccgccctcgtcgcggatcttgcattgcagtgccagcaacggcagttggatgcgcaagtgctgggtgaagagcagttggcgccgagcggactccagcgagtcatccagcagtgtttccttgaccagtgccgggtaggtattgccgatgtccacgcgttggatcaagccttccaggtactcgatcgtcagccagtccggcaggttctgcgggttacgctggcacagcgttttgatacccaggggcagggcgatcaggttttgcagggccagctcgggcaggctgaacattgaggtgtcggtctgcccgggcacaggaaacaagccccacaccactgggctgcgcactgtgatgtcgaggttgcccagccactgcgtggaagcctcgggatgatccttgagcatctcggcattcaactggtccagggcgtattgctcgatggggtttatgccctcttgataggttttgccctgattcaaactgtgcagggtcgcgaggtctttgaggtggcgcgaaaaggcgtcttgatccggggctgaagcgttggtcagccagtcgggcagggcatgtacatactcttgtaagtcgggattactgagtgaagcttgaggtgttgggggttgtatcaagctttgctggggggcgccgggttcgcgtaaatcggaaaaactgatattcccgatggccatgatttgcaggtcgataaaagcacaggccaggtagtcgaaaaagtcgccattgggctccaccagacgccactgcacttttatgccccccagtgcgatgcccagaagcttgggcaggttctgggcgagttgttccacgctggtgtgtttctggaatcccccgagcagtgaatggctgaggatcacctcgttgccatgtttgcggccgatcaagacgctgatcaggtgttcgtcaaggtgagtgacctttcctgcgtcgtcgatctgatcgatatcaatcacgtaggccttggcggcctgcgggtcattgaggctgcgctgggcgaagtccggcgtgcgaaacaactggcgcgccatctcgcaatcatcgtcgttcaagccggttacctgctgtacgttccagaagtcgcgcagcgtcttggacagtgcgtgccagcgcgggccgctgtcggcttgcgagttgttccaatactccatctgggcctgttgataaccgcgcagcatcacgggggccagtgtattgatgagggcggcgatatcgagaatgcgtaccggcaggtgcaccgccggctcaatgatcggcagttgggtcagaaagtgttcgccttcgatatacaacacaggcaccgccagcacggcctgtacggcgaggatatcggtgagcgctttgtaatgacggtcgacaggcacgacatggccatcgtcaacgtcccagaccggggtgcccaccatggtcacattcgggtcgatgtccagggtcgggtacagctcctgcaactgttcacgtagcagcgcggcggcgacttcgcgaaacgcagggcccgtggacatttgcgtgattagcgtatcggtgaggttttgatgggaataggcggtcatggcacgtcctgacagataaaagaatggcaacggccccagggcatccctggggtgttgtcatgctaggaagcgtcgtgtcaggtacggtggtgcttatataggcgggatgctcagcgcaactcgccgcacaggtccagttccaccaggcggcgcacttcctgggtgtcgagcccggcgccgatcagcgcgttgagcttgccgaacgctgcttcgcgggtcatgcctccaccggacagcacgccgacgccgcgcaggcggctgccggcctcgtaaacatccagctccacgccgccctcatggcattgagtgatcgccaccaccacaatcccttggtcgtgcgcccgttgcaggctggccaggaacgcagggttgtcgctcggcccggtaccgctgccgaagcattcgaggatgagtgcctggataccgctgtcgatcagcgcgtccaattgaatggccgcgatgcccggtacgagcggcaacacgccaacgttggccagggctttgggttggcggtaatgcagggctgcggggatcatttctgcctgggccacaccgccattgcgttgcagagcggcaaacgggctgcggccaaagctgcgaatttttgcgcagcgggtcggcgccatcagcgcaccgtggaaatacagctgcacaccggctgccaggccttcgcccaatgcggccaatgcaccgctgacgttttcccaggcatcactgtcgggcacgccagccggcaacatggagccggtgaacagcactggcgccggcaggcccagcagctggaagctcatggcggccgcgctgtaggccagggtgtcggtgccgtgcagaatcagcacgccatcgcagccctggtccacggcgtcgatcacggccgtgtgcaggcgctgccagtaggcgggggtcatattggcgctgtcgatcagcggggccatttcctgaaagcgccaggcgggcagtggctggttggcgagctgctcgcgcatgcgcgcttcgaaaccagaggcaggggccaggccgttggcgctggcttgcatgccgatggtgccgccggtgtagagcaccatgacgttattggatgctgacattgagattctcctgaacgaaaagcgccgccgggcccagagcatgcccaaggccgggcggcgtgtcactgctgatcgttttagcgttgcgcttgagcgttcagttcagccgatggagccacgtgcggttgtgccggatttgctggccacgccttgcggtccaggtccaggtcagggaactggctggagtcgaacaccggtgtcttgatgcccgctgcacgctggttgtcgtagtcgttcaggatgcgcatggcgatcttgaacaggaatgccaaagcgaacaggttgacgaacgcgagcatggtcatggtgatgtcggcgaaggcgaacacggtgctcaggttctcgatcgagccccagaaaatcagcgccagtaccacagcgcggtagcccatcagcaccttgcggttgttaccgaccaggaagcgcaggttgctctcgcccagatagtagttgtacatgatcgaggtgaacacgaacaacgccagggccacggagatgaacatgcggccccagtcgccgactactgcggccagggagttctgggtcagggcaatgccgtcgccttcgaagcccggggtgtagaagccggagagcaggatcagcagcgcggtgcaggtgcagatcacgaaggtgtcgaggaacacactgaacgcctggaccacgccctgagcaatcgggtgttccacggaagcgacggcggccacgttaggcgcactgcccaagccggcttcgttggcgaacacgccacgtttcacacccatgatgatcgcgctgccgaccaggccaccgaaggcttggtccagaccgaaggcgctcttgacgatggtcgcgagcatggccgggacgtggtcgaattgcagcacgatcacgtacagggtcacggcgatgtagaccagggtcttgaccggaaccagcaggtcggcgatcgaagcgatgcgcttgatcccgccgatgaataccaggcccagcaataccgccagcgccaggccggtgtaggtagtgtccagaccaaaggcgctgttgagcgagtgggtcacggcgtgggcttgcaggccgttgaaggcgaaaccgaaggtcaccagcaacaggaacgcgacgaccatgcccagccagcgtttttgcaggccgtgctggatgtagtaagccgggccgccacggtaagtgccgtcgacgtcagtgcgtttgtacagctgaccgagggagcactcgataaagctcgaagacatgcccaccaacgcggtgacccacatccagaacacggcgcccgggccacccagggtcacggcaatgccgacaccggcgatgttgccggcacccacgcgaccggccaggctgagcatcagcgcctggaaggagctgagttggccggagctgcttttcaggctgtctttaaacaccgaaaacatgtggaaaaagtgacgcagttgaacgaaacgcgaacggatcgtgaaataaccgccgagcccgacaatgagcacgatcaggactttccctgataggaagtcgttgatgacttcgagcatggagtgttcctcgctgatttttctaatggcaaacgcaggacggtccgatccctcgcatagcaccaggcagtgcgcgacggttcgaccccaatccttttgcgggttgttattcatgcggtttcgcgctgtatcagggcctcgttaccgacggccgcacacgcgaagaggggcggcactatacctaggcaagcgtgattcgtctgcttgggctgattaaaggtttcaccaagatctttctggtgacacccgtttactgtgggagccgggcttgcccgcgacggcggtgtgtcaggcgacagtgctgccaactgacccgtcgccatcgcgggcaagcccggctcccacagggttttgcggtgttcggtcgagcgtgtttcaggcaaaaaaaagggcctgaagaacgagccttcaggccctcaaaaggtgagaggtgtctagtccctcaacctggtgagcggtgcaacaaacgtcaggccttcagcgggaccagacgtggggcaatcatgttttcggggcgcaggatgtcgtcgagcatggcgtcgtcgagcaagccttcttcgcgcaccagttccagcacgccacggccgctttcaagggcgatacgggcgatgcgggtggcgttttcatagccgatgtacgggttcagcgcggtgaccaggccgatggagtgctccaccaactcgcggcagcgggcttcgttggcggtgatgccgacgatgcagtgttcgcgcagcatgtccatggcgcgttgcagcaggcggatcgagtcgaagatcttgaaggcgatcaggggctccatcacgttcagctgcagttggccgccttcggctgccatggtcagggccaaatcgttgccgatcacctggaatgccacctggttcacggcttccgggatcaccgggttgaccttgcctggcatgatcgaactgcctggctgacgcgcgggcaggttgatctcgttgatgccggtacgtgggccgctggacagcaggcgcaagtcgttgcagatcttcgacagcttcacggcggtacgcttgagcatgccggagaacagcacgaaggcgcccatgtcggaggtggcttcaatcaggtcggcagccggaaccagcggctggccgctgatcagggccaggcgctgaacggccagggcctggtaacgcgggtcggcgttgatgccggtgccgatagcggtgccgcccaggttcacttcggtcagcagctctggcgccagggttttcaggcgggccaggtcttcaccgagggtggtggcgaaagcgcggaattcctggccgagggtcatcggcacggcgtcttgcagttgggtgcggcccattttcagcacgtggccgaactcgacgcctttggcggcgaaggcctgaatcaggctgtcgaggctggccagcagtgcgtcgtggcccagcagcagacccagacggatcgcggtggggtaggcgtcgttggtcgactgcgccatgttcacgtcgttgttggggtgcaggtactggtattcgcccttgttgtggcccatggcctccaacgcgatgttggcgatgacttcgttggcattcatgttggttgaagtgccggcgccgccttgaatcatgtccaccacgaactcttcgtggaaatcgccgcggatcagacgggcacaggcttcgctgatggcagcgtgcttggcttcgctgagctgacccagctcacggttggcgtcagccgccgcttgcttgaccattgccagaccgaccaccaatttcgggtaatgcgaaatcggaacgcccgagaggcggaagttgttcaccgctcgcagggtctggatgccgtaatacgcttgagccggtacgtcgagtacgccaagcaggtctttttcggtacggaatgatgcagcagaggacatgacggaaatcatctcgatagggacccggaactagccggaacgctgcgaatgctaggcttgtagaaggttttgggccaatgctgttcagcactggcctatgcacaaacggcataatgtggctgtgacccggttatcatggcgggcgtgtgtgccaaaatggtgcgtacccgtgggaggaagtgatgaaccttgagagcaaatggctggaagacttcagcgcgctggcggcgacccgcagtttttcccaggcggcagaacgacgctttgtgacccagccggcgttcagccggcgtattcgcagcctggaagccgcgctgggcctgacactggtcaaccgttcgcgcacgccggtcgaactgacggcggcggggcagttgttcctggtgacggcgcgtaccgtggtcgaacagctcggtgaagtgctgcgccatttgcatcatctggaaggcgggcagggcgaagtcatgcaggtggcggcggctcactcgctggcgctgggttttttcccgcgctggattgcgcagttgcgcaacgaaggtttgaacattgccacgcggctggtcgccactaacgtgggtgacgccgtgcacgccctgcgcgaaggtggttgtgacctgatgctggcattctacgacccggatgctgcgatgcagatggacgccgaaatcttcccgtcgctgcacctgggcaacaccgaaatgctcccggtgtgcgcggccgatgccgacggcaagccgctgttcgacctggaaggcgagggcagcgtgccgctgttggcctacagtgccggtgcgtttcttggtcgttcggtgcacctcttgttgcgccagcgtgcgttgcgctttaccactgtctacgagacagcgatggccgacagcctcaaaagcatggcgctggaagggttgggcattgcctgggtgccgcagttaagtgtgcgcgccgagctggcccggggtgaattggtggtgtgcgggggcccgcaatggcatgtgccgctggagattcgtctgtaccgctgcgcgctggtgcgcaaggcgaacgtgcggttgttgtggcgcaagctggaaggtggggctgcacagggaacttgattaggatgaagatcaaatgtgggagctggcttgcctgcgatgcagacacctcggtacatcaggcagtttgaggtgatgctatcgcaggcaagccagctcctacagtgacccagtttccatgagaaatgcgtggtgcgttcgctgacttgagagtcaataaaaccgccactttgccccgctagacagatggtcatccaaggggctgtttatctcgattattacggtatactgcgcggccttcggccggtccaaccggccttaattcgtacaccaagccacgccggatttcccgcgtggcttgttgttttttgacgcgcctgcgggcgcccagagagaagaggcacgacgatgagtgcattggttggcgtgatcatgggctccaagtccgattggtccacccttagccacaccgccgatatgctggaaaaactcggcattccctacgaagtgaaagtggtttccgcccaccgcactccggatttgctgttccagtatgccgatgaagcagaatcccgtggcatcgaggtgatcatcgcgggtgccggtggtgcagcgcacctgcccggcatgtgtgcggccaagacccacctgccggtgctcggcgtgccggtgcaatcggcaatgctctcgggcgtcgactcgctgttgtccatcgtgcagatgccggccggtattccggtggcaaccctggccatcggcaaggctggtgcgatcaacgcagccctgctgtccgccagcatcctgggcgccaagcacccgcagttccacgcggtgctgaaaaaattccgtgccgagcagacagacagcgtgctggacaatccagacccacgcatcgcctgaggtttttttacgatgaaaatcggtgtaatcggtggcggccaactgggtcgcatgctggccctggcgggcaccccgctggggatgaacttcgctttcctggacccggcgccggacgcctgcgcggccgcactcggtgagcatctgcgcgctgactacagcgacccggaccacctgcgccaattggccgacgaggtcgacctggtgaccttcgagttcgaaagcgtcccggctgaaaccgtggcgttcctgtcgcagttcgtgccggtgtacccgagcgccgaagccctgcgcatcgcccgcgaccgctggttcgagaaaagcatgttcaaggacctgggcattccgaccccggccttcgccgatattcagtcccaggcggacctggacgcggccgttgccagcatcggcctgccggccgtgctgaaaacccgcactctgggttacgacggcaagggccagaaagtcctgcgtacagcagcggacgtggtcggcaccttcgccgaactgggcagcgttgcctgcctgctggaaggcttcgtgccgttcaccggcgaagtgtcgttgatcgccgtgcgtgcccgtgatggtgaaacccgtttctacccgttggtgcacaacacccacgacagcggcatcctcaagctgtccgtggccagcactgaccacccgctgcaggctctggccgaagactattccagccgtgtgctcaagcaactggattatgtcggtgtgatggcgttcgagttctttgaagtcgacggtggcctcaaggccaacgaaatcgccccgcgtgtgcacaactccgggcactggaccaccgaaggcgccgagtgcagccagttcgaaaaccacctgcgggcggtggcgggcttgccgctgggctccacggccaaggtcggcgagagcgccatgctcaacttcatcggcaccgtgccggcggtggaaaaagtcatcgccatcgacgactgccatctgcaccactacggcaaggccttcaaggccgggcgcaaggtcggccacgccaacctgcgctgcaaggaccgtgcgacgctgcaagcgcagatcctcaaggtagaagcgctgatcgccgagcaataagcctgagaccggcgggaaccattcggtgaccgccgtcctctgattgcaggacgccaaagtctgactaggctttcgtgtagttcacttcattcagagggaaatgccatgggtatcatcggaaccatctttatcggcctgatcgtcggtctgctcgcgcgtttcctcaagcctggcgacgacagcatgggctggatcatgaccatcctgttgggtatcgccggttccctggtcgccacctacggtggtcaggcgctgggcatctaccaggcgggccagggcgcaggttttatcggcgcgctgatcggcgccatcgtgctgctggtgatctacggcctgatcaaaaagaaatgatctaagcgacaaagccctctgcgctgcgcaggcgcagagggctagaatgctcgccacctgtacttgccgagcttcttcatgcgccgtcttctgttgactcttctcttgctgggctcaggccttgcacacgctggcgaactgccggaaaccgactggctcgacttgatgccgctttccgaccagaaagccctcgaagccatgcccgagattgaccacaactcccccgaagcccaaggcacgttcaccgacaaaggtggcttgaagcaaagcaaaggcttgccggcagtgatgtattccaccaagaccgtagccgccatgaacggcaagaacatccgcatcggcggctatccggtgccgcttgagactgacgccaaaggccgcagtacgttgttcttcctggtgccgtacccgggcgcgtgcatccacgtgccgccaccgccgccgaaccaattggtgctggtgcgttatccgaaagggttgaagctggatgatatctacacgccgctatgggtgacgggcacgttgaaggtggagaaggtcaacaatgacctggccgatgcggcgtatgcgctggatgcggggaaggtgcgggtcgtgaaggagtccgacctctaacacccggcacataacccctgtgggagctggcttgcctgcgatgcgggcacctcggtgtatcagtgatacccgggtgatgctatcgcaggcaagccagctcccacattttgatcggggttacagggcgacggcggtgatgctcacgcccaaggtgtggctttcgcctggcgccaatgtcaccacatcatcgagcacattcgccgtctcgatgcacagcatgccctgccagccgtcgtcggccatgtcatcgaacgccttggcgcgttcggtccacgggttccagatcacggtggacttagagccctcggctgtgagctggatgcggcgctgccagtccttgtcgacgatgttcagttgcgccggcgtgtcgaggtagatgcggtcggtctcggcggtgaagtgcagcaggccggattggtttttctcggcccagccgtcggctgtgtcgatatacgtcaatccgtccagcccttcgacctgcacgttgcgcacatcgctcatggcgaaataggtgtgcagcgcctggctcagggtcacggtgtcagtgccacggttatggctggtcaggcggatatgcagttggtcgtccagcagcagactcagcttcaattcgacctgatggggccagcccgggaagccgcccgcaggcaccggcaaggccagatctacccgcagtgcctcgccttcaagctcggttccagtcaactcccagatcgccgtgcgcacaaaaccgtgggccccggcaggctggtcgctgtgacgcatcgccttgacgctctgcgggttgcggtcgaacacaccaaaccacggccagcacaccggcacgccggtgcgaatgcctttgcctctcttgaacaccgcctcggggttcggccagatcagcggctgctcgccgtcgcggccgtaactgaagatatgcgcgccctgttgggccaccatcagttcggcgccgttatggcggatgcgccagcagtccagttcgtcgattttcacggtttcaacgtggggcacaggcatacaaagcactctttatggcaggcaatggggcagttgaccgtcaaaaccccgtgaggtttaacgcgcgcgcgacggtaccgaacgcgtgcggccgctgccgtcgatggcgacaaacacaaacaccgcctcggtgaccttgcgccattcgctggacagcgggtcgtcgctccacacttcgaccatcatctggatcgagctgcggccgatttccagggcctgggtgtaaaaggaaagctgcgcaccgactgccaccggcaccaggaacgccatgcgatcaatcgcaaccgtagccacgcggccacctgcgaccttgctggccatggcggtgccggccaggtccatctgtgcgaccagccagccgccgaagatgtcgccaaaaccgttggtttcacgcgggagcgcggtgatttgcagggcgagatcgccttgcgggataggatcttcttgttcgagttcgatcatgccgagggtgcctctgacccgtaacgcttcatgggtatttcaagtggatagccgtcttctggaaaaacgtttcagcaccaacatacaccgcgtgatgcgtttctcgtaaggcgtactaaagggaaactctgccaaatcggctggatggcacccaacggcgttttggcacagcagcccctcaagacagcgggtttggcgctggcaagggccgagtatatcgagacgctggcgccgcgacgacctcccggggctcatttggtcggcaaatcgcggctgtatcggggctttttccgttaactgtgctcatggcgtggaatattcgccgcagctggggtgttgttccggtcagtaccggccttaatgagatgcccccatgactaccgcgccgctgatgcgcccgctgacccgcagcgattacaaaaccctgtcgttgtccgccctgggcagtgccctggagttctacgacttcatcatcttcgtgtttttcgcggcggtggtgggcaagttgtttttcccgcccgacatgcccgagtggatgcgcctggtgcaaaccttcggcattttcgcggccggctacctgatccgcccgctgggcggcatcgtaatggcacactttggcgacctgttggggcgcaagaggatgttcaccctgagcatcttcctgatggcgctgccgaccctggccatcgggttgttgccgacttatgcacaggtcggtttgctggcgccggtgctgctgctgttgatgcgcatgattcagggcgcggcgattggcggtgaagtgccgggggcgtggatctttgtcgccgaacacgtaccggccaagcgtatcggttatgcggtgggtgtcttgtcggtaggcctgaacctggggattttgctcggttcgctggttgccacgggcgtcaatggcgcctatagcccggagcaggtggcggattacgcatggcgtattccatttgtgctgggcggggtattcggtttgttgtcggtgtacctgcgccgctggttgcatgaaacgccggtcttcgccgagttgcagcagcgcaaggcgttgtcccgggaagtgccgttgcgcacggtactgcgtgagagccgtgagtcgattgtgctgtccatattgatgacctggtttctgtccgcaggtgtcgtggtggtcatcctgatgacgcccgcgctgctgcaaggggtttaccacttcgcgcccaaagtcgccttgcaggccaacagcctggcggttgtcacgatggcgctgggcttggtcatcgccggcaagctctgcgaccgcgtgggggccggccgggtgctggtgtttggctgcctgggcttgatgctgacgtgctgggcgctgtatgcgagcctggccagccacccgcaatggctgttcccgctgtacatgttgaccgggctgtttgtgggcacggtgacggccgcgccgttcgtgatggtcaccggtttcccggcagccgtgcgtttcagcggcttgtcgttttcctacaacctggcctacgccgtgctcggcggcctgagcccggtattcgtgtcattgctgctcaaagagagcccgatgggcccggcttactatgtggcgctggtgtgtgtgatgggcatggcggtcggcgtttacctttggaaacgcgggcgttaagcaacgctgtgcttttgcgggcgatttgctatcgtgccaaaccgaccccggcgcgtgccggggtctcgcgttcgccgtcctgacaataagagaagccttgccatgtcctctgtgcccgcaagcagtgcgcaaccttcgcgcccgctgacccgcaacgactacaaaaccctgtcgctgtctgccttgggcggggcgctggaattctacgacttcatcattttcgtgtttttcgccaccgtggtcggaaaactgttcttccctgtggacatgcccgaatggctgcgcatgatgcagaccttcggcatcttcgccgccggctacctggcacgcccgttgggcggcatcatcatggcgcacttcggcgacctgctgggccgcaagaaaatgttcaccctgagcatcttcatgatggccgtgccgaccctgatcatgggcctgttgccgacctatgcgcagatcggcctgtgggcaccggtcctgctgctgctgatgcgcatcatccagggtgcggcaattggcggcgaagtgccgggggcgtgggtattcgtttccgagcacgtgccgccgcgccatatcggctacgcctgcggcaccctgaccagcggccttaccgccggcattctgctgggctcgctggtggccaccgccatcaatactttgtacagcccggagcaggtgtcggattacgcttggcggatcccgttcctgctcggcggtgtgttcggcctgctgtcggtgtacctgcgccgctggttgcatgaaacgccgatcttcgccgagatgcagcaacgcaaaaccctggcggccgagttgccattgcgcgcggtactgcgcgaccaccgcggtgccatcgtgttgtcaatgctgctgacctggctgctgtcggcgggtgttgtggtggtcatcctgatgactccgaccgttttgcaaaccgtctaccacttcagcccgacggttgcgctgcaagccaacagcctggccattgttaccctcagcctgggttgcatcgcctccggcgcattggctgaccgctttggcgccggccgcgtgctggtcgtcggttgcctgctgctgctggcgacctcatggaccctctaccacagcctcatcgaccaccccaactggctcttcccgctgtacaccctgaccggcctgtttgtgggcgtgatcggcgtggtgccgtatgtgatggtcaaagctttcccgccagtggtgcgtttcagcgggttgtcgttctcctacaacgtcgcttatgccgtgttcggtggcctgacgccgctggcggtatcgctgctgatgaaggaaagcccgatggggccctcttactatgtcgccgtgctgtgtgtgatggggatgttggtgggcgcctacctgtggaaacgcggccgctgattcaccgataaccctgtggcgagggagcaagctcgctcgccacaggtttttgtgttgtgccaacgattacagagtgtttctgaaatatcccctaaacctccccgcaacccccggttttattgacttcctcccttcctgacaggtttttcacaaatactggcctttcatctaattgtcacattccagacatagagtgttcacacggcctaccgatacttggccccgatccaactatccctatctgctaggagcaaggcatgaaactgaaacgtttgatggcggcaatgacttttgtcgctgctggcgttgcgaccgccaacgcggtggccgctggtgttgatccggcaatcccggcttacgttaagaccactggtgtgtcgggcaacctgtccagcgtcggttccgataccctggctaacctgatgaccctgtgggctgagggttacaaaaaggaatacccgaacgtcaacatccagattcaagccgccggttctgccactgcgccacctgcgctgactgaaggcacctccaacctgggcccgatgagccgcaagatgaaggacaccgaactggctgccttcgagcagaagtacggctacaagccaaccgctatcccggttgccgtggatgccctggctgtgttcgtgcacaaagacaacccgatccagcacctgaccatggaacaagtcgacgcgatcttctcctcgacgcgtctgtgcggcgccaaagccgacgtgaaaacctggggtgacctgggcgtgaccggcgacctggcgaacaagccggttcaactgttcggtcgtaactcggtatccggcacctacggctacttcaaagaagaagccctgtgcaaaggcgactacaagccaaacgtgaacgaacaaccaggctcggcttcggtcgtgcagtcgatcagctcctcgctgaacggcatcggttactcgggcatcggctacaaaaccgctagcgtgaagaccgttgctctggccaagaaaggcagcactgacttcatcgaagacagcgaagaaaacgccctgaacggcaagtacccactgtcccgcttcctgtacgtgtacgtgaacaaagccccgaacaagcctctggccccgctggaagccgagttcgtgaagctggttctgtccaaacagggccaggaagttgttgtgaaagacggctacatcccgctgccagccaaagtcgccgccaaggcgctggctgacctgggtttgaaagaaggcaactaagcctgcaatacctggtgtagacgaatgctgttctgtgggagcgggcttgcccgcgatgctggcgacacggtgtagagctgaaaccgtattgatgccatcgcgggcaagcccgctcccacactagccgtctacacctcctaattttcagtccgctgccagctctgctacgcggcggctttgttgcgtcactgcactgtcatctttctgtcatacaggaccgctagggtgtgcgcatgaatgatctggccaattccaccatgacgacgacttcccctcccaagcgtattgatttcaatacgcctgagctgcaacgcaagcgccgcattcgcgcgctcaaagatcgcctgacccgctggtacgtgctggtcggcggcctcgccgtcctcggcgccatcaccctgatcttcttcttcctggcttatgtcgtcgcgcccctgttccagggtgcctcgttgaccaaggaagaagccctgagcccagcgtggatccaggacgccggcaagccgttgatgatctccctcgaagaacagaaccaggtcgccatgcgggtttccgacaagggccaggcgctgttcttcaatgtggacaccggcgccgagctcaagcgtgtcgacctgccgcttccggcgggcgccagcgttgcctctattggtaaagaccagccgggcagcccgctggtgatcctgggtttgtcgaatggccagtccctggtgttccgccacacttataaagtgtcctacccggacggcaagaaaaccattacgccggcggttgaatacccttacggtgaaacgccgatcgtcctcgacgatcagggccgcccgctggaacacgtcgcgctcaacgccaccgactcctcgctggtggtggccggttccgccggttcctacttgaacgtgctgagcctgagccgcgaagaaaacatgatgaccggcgaagtcaccagcgagcagaagcgtatcgagctgccgcaaatgaccgagccggtgaaggcgatcttcatcgacccgcgccaacagtggctgtacgtgatcaacggtcgtgcattggccgacgtgttcagcctgcgcgacaagagccttaacggtcgctacaagctgctcgaagacggcacgtctgaaatcacggccagcacccaactggtgggcggcatctcgctgatcgtcggtaactccaaaggcggcctggcccagtggttcatggcccgcgacccggatggcgaacaacgcctgaaacagatccgcaccttccagatgggcacggcgcccatcgtggaaatcaccgctgaagaacgtcgcaaaggcttcaccgccctcgacgcttccggcaagttcggcgtgttccacagcaccgcgcaccgcacccttctggtggacccggtggttgaaggccaaggcctgttcggtctgtcgccgcgcgccaaccgcgtgatcgtggaagccggcggcaagctgcaaccgctggcgctggacaacccgcacccggaagtctcgtggagcgcgttgtggagcaaggtctggtacgagaactacgacgagcctaaatacgtctggcaatcaaccgcggccaacaccgacttcgaaccgaaaatgagcctggccccgctgaccttcggtaccttgaaggccgcgttctacgccatgctgctggcggcgccactggcggttgccgctgcgatctacaccgcttacttcatggccccgagcctgcgccgcaaggtcaagccggtgatcgaactgatggaagcaatgccgacggtgatcctcggcttcttcgccggcctgttcctggcgccgtatgtggaagggcacctaccgggcattttcagcctgttgatgctgttgccgattggcatcctggtcgccggttttgtgttcagccgcttgcctgaatcgctacgcctgcgggttcccgatggttgggaaagcgcgattctgatcccggtgatcctgttcgtgggctggctctcgctgtacatgagcccgtacctggaaacctggttcttcggcggcgacatgcgcatgtggatctctcacgatctgggcatcacctacgaccagcgcaacgctctggtcgtcggcctggccatgggttttgcggtgatcccgaacatctactccatcgccgaagacgccgtgttcagcgtgccacgcggcctgaccctgggctcgctggccctgggtgccacgccgtggcagaccatgacccgcgtggtcatcctgaccgccagcccgggtattttctcggcgctgatgattggtatgggccgtgcggtcggcgaaaccatgatcgtgttgatggccaccggtaacaccccggtgatggagatgaacctgttcgaaggcctgcgcaccctggcggccaacgtggcggtcgagatgccggagtcggaagtgggcggtagtcattaccgcgtgctgttcctctcggcactggtgctgctgctgttcaccttcatcatgaacaccctcgccgagctgatccgtcagcgtctgcgcaagaaatactcgtcgctttaagaaaggtagaagtctgtgaaacagaactccctgaatggatggttcaagagcggcgccccaggcgtctggatcagcggtggcgcggtgtccatcgccgtcatcatgaccattggtttgctggcggtgattgccgtgcgtggcctgggccacttctggccggccgacctgatccaggccaactacaacgtgccgggccaggaaaaccatatcgtcatcggcgaagtggtgcagaaagaagaagtgccccgcgagcgcctgaaaagcgccgggttgccggtgccggaccaaggcccggaattcatgacccgcgagctgatcaaagtcggcaaccgcgacctgaatggcaacgacttcacttggattgtcggcgagtggttgaaggaccagaccaagccggtcgagctgatggcggtcgagcgtcgcgagtggggtaacttctacggcaccctggtcaacgtcaagcaggacggcaaagtcatcgccgaaggcgaggccgcatggcctgagctgcaagcccgagttgaccgcgtgaacaagctggctgcccagctcaagagcctggaaaaaaccgacatcggcgcgatcaacgccgggctggaacgcatccgcctgcacggtcgcaagctggagctggaaggcaagctggacgccaccgcgcaagcggatatggactccggccgtgccgagctgaacaaccgttacaaggacatcgaagcgcgcctggctgacctgcacacccagttcaaccgcgacagcctgaccgcccgcgatgccaacggcaaagaaattgaaatcggcatcggcaaagtggtgcacgcctaccagccgaacgccatgggctacatgaccaaggtcggcttctacttcagcaaggtgtgggaattcctcagcgatgacccacgggaagcgaacaccgaaggcgggattttcccggccatcttcggcaccgtgatgatgaccctgatcatggcgatgatcgtgaccccgtttggcgtgctggcggccgtgtacctgcgtgaatacgccaagcagaacaccttgacccgcgtgatccgtattgccgtgaacaacctggcgggcgtaccggccatcgtctacggcgtgttcggcctgggcttcttcgtgtatgtactgggtggctcggttgaccgcctgttcttcgccgaagccctgccggccccgaccttcggtactccgggcctgttgtgggcctcgctgaccttggcgctgctggcggtgccggtggtgatcgtggccaccgaagaaggcttggcgcggattcctcgcactgtgcgtgaggggtctttggcactcggcgcgaccaaggcggaaacgctgtggaagatcgtgctgccgatggccagcccggccatgatgaccggcatgatcctcgccgtggcccgcgccgccggtgaagtggcgccgctgatgctggtaggtgtggtgaaactggcgccgtcgctgccgctggatggcaactacccgtacctgcacctggaccagaagatcatgcacctgggcttccatatttatgatgtgggcttccagagcccgaacgttgaagcggcacggccgctggtgtacgccaccgcgttgctgctggtgctggtgattgccacgcttaacctgtcggcagtgtggattcgtaaccacctgcgtgagaaatacaaagcgctggacagttaatgcgattccctgtgggagctggcttgcctgcgatgcagacgacgcggtgtttcaggaaaaccgcattgatgccatcgcaggcaagccagctcccacaggagaccgcgcaggacattgagatcaagtaaaccgttcacacagcggttcaacgaaacgaattggtagcacagggagcatcccatgcaacatgaaacccacacccacggcatcaacatgtcggccctgggtcgcgacaagcagagcctgagcctggcccaggaaaccgtggccatcgaagtgccgggcctgagcctgtactacggtgaaaagcaggcgctgttcgatgtcagcatgaacatccccaagcagcgcgtgaccgcctttatcggcccgtccggctgcggcaagtccacgctgctgcgtacgttcaaccgcatgaacgacctggtggacggctgccgcgtagaaggcgcgatcaacctctacggcaccaacatctaccgcaagggcgaagacgtggccgagttgcgtcgccgtgtgggcatggtgttccagaagccgaacccgttccccaagaccatctacgaaaacgtggtctatggcctgcgcatccagggcatcaacaaaaaacgcatcctcgacgaggccgttgagtgggccttgaaaggcgcggccttgtgggacgaagtcaaagaccgcctgcacgactcggcactcggcctgtccggcggccaacagcagcgtctggtgattgcacgcaccatcgccgtggaacctgaagtgttgctgctcgacgaaccctgctcggcactcgacccgatttcgacgctgaaagtcgaggagctgatctacgagctcaagtccaagttcaccatcgtcatcgtgacccacaacatgcaacaggcggcgcgggtttccgactacaccgcgttcatgtacatgggcaaactggtggagttcggggacaccgacaccctgttcaccaacccggccaaaaaacagaccgaagactacattaccggtcgttacggctagtcctcggcggttctgattgcactgaatgctgcggcctcccgcaccttaccggacgctccaaggacacccacatgatcagcaaagaaggccttacccatcacatctccgcgcagttcaacgccgagcttgaggaggtgcgcagccacctcctggcgatgggcgggctggtggagaagcaagtcaacgacgccgtcaccgcgttgatcgaggccgactcgggcctggcccagcaagtgcgcgagatcgacgaccagatcaaccagatggaacgcaacatcgacgaagaatgcctgcgcattctggcgcgtcgccagccggcggcgtccgacctgcgtttgatcatcagcatctccaagtcggtgatcgacctggagcgcatcggcgacgaagccaccaaaattgcgcgccgtgccatccagctgtgcgaagaaggcgaagcgccgcgcggttacgtggaagtgcgccacattggcgaccaggtgcgcaacatggtccgcgatgcgctggacgcgttcgcccgcttcgacgccgaactggcactgtcggtagcgcagtacgacaagaccatcgaccgtgaatataaaaccgcgctgcgcgaactggccacctatatgatggaagacccgcgctctatctcgcgggtcttgaacattatctgggtgctgcgttcgctggagcgcatcggcgaccacgcgcgcaatatctccgagctggtcatctacctggtgcgtggcaccgacgtgcggcacatgggcctcaagcgcatgaaggccgaagttgaaggcactgccgaccaaatccctaatgttccgggcgaaactgacgataagtaagattgcccgagaacttaacgcccggcctttggccgggcgttttcgtttgtggcttctgaattttttgcacagcaggcgacataaagtccttctgtgacccgcgagttttggcaaactgccatcagtcaggcgttttgcgtgccgaagtttttataggatgaagggtcgatgagtaaagtcagtgtattggtggtggatgacgcctcgtttatccgcgacctggtgaagaagtgcctgcgcaattacttcccggggatcaagattgaagacgcggtgaacggcaaaaaggcgcaatccatcctgatgcgcgagaccttcgacctggtgctgtgcgactgggaaatgccggaaatgtccggccttgaactgctgacctggtgccgcgagcaatcccacctcaaggccatgcccttcatcatggtgaccagccgtggcgacaaggaaaacgtggtgcaggcgatccaggccggcgtttccggctacgtcagcaagccgttcaccaacgagcagttgctgaacaaggtcaagcaggccttgcacaagattggccgcctcgacgcgctgatcgccagcgcgccgaccaagatgaactcagctttcggcaacgattccctgaacgccctgaccggcggcaagccggaagccacccgcccggcgccggtcgccgcccccagcaaaggcctgctcaacagcccgccggtacaggcgcctgcggctacctcgccggcgagcggccggggtcagggccaattgcgcctttccagcggcaaccagcaatgcgtgatcaaggcgctgagcatcaaggaggcgctgctggtggtgcgtcgcggtgaagtgctgccccaagtactggaaagcgctgtgctcgacctggagcaaggcgacaacgccgaagtcgcccgtctcaacggttacctgcacgccatcgtcgcctatgaacccaaacccgacagcgactggttgcaactgaccttccggtttatcgaccaggacgcgcagaaactcgactacatctcccgcctgatcgcacgcggcacggcgcagaagcacttcgtgccgggggcgtaagctgtcagacgacacctgacccgtgtgggagcgggcttgcccgcgatgaggccctgacagccgaaatttctgtcgccagacactccgttatcgcgggcaagtcgaatcgtcgcaccgccgctcccacatttgatcttcagcgctgcccacacagggttgtcatcaaacctcgctaacctgccgctcagtcatcccggcaggttcacgccatgttcatgcgtttattgctgctttgcgggttggccacggtgtgcactccaaccttggccatgaccctctaccgctccaccgacgccaatggcgaggtgtttttcagcgaccggcaaacgcccggtgcccaggcgttcgagatctatgagcgcaaggtcctgcgcccggcgcccgaaaggccgcaacgcgcctatccaccgcaagcctaccgctacccgctgccctggcgcggcggcccgttccgcttgacccaaggccccaacggcagcttcagccataccgatgccaaaagccgctacgccatggacatcgccatgcccgaaggcacgccgatcattgcggcgcgcagcggcgtggtggtgaagaccgagaatgagcaggtggggcgcggcaatgatgcgtcggggaattttgtgcgggtgcgccacgatgacggcaccgaaggggtgtacctgcacctcaagaaaggctcggtcagcgtgacggcagggcagcgtgtagcggtgggaagcccgctggcgctgtcgggcaataccggcaacagcagcgggccacatctgcatttcgtggtgcagcgcgccactgaagcggggctggtgtcgatcccgtatgagttcagcagccccgtcggcacattgcccaactttgcgttgggcaattaagcgtcagtccagcagcaggactttggccagtacgatcttcggccctttcatctttttgatgatgatgcgcaggccttcgacctccagcacttcttcctcttcgggcacgcgcttgagcgtgtcgtagatcaggccggccagggtttcggcttcgatgtggtccaggtccacgcccagcaggcgctccaccttgaacagcggcgtgtcgccacgcaccagcaacttgcccggctggtaggcgaggatgccgcgctcggccttgcggtgttcgtcctggatatcgccgaccagcacttcgagcacgtcttccatggtcaggtagccgatgatcttgccgtcggcttcttccaccaaagcgaaatgcgcaccgcctttgcggaactgttccagcaactgcgacaacggcatatgccgcgacacgcgctccagcgggcgggtcagctcggccaggttgaacgattcgggaatgtggtccagcgccgccagctccagcagcaggtccttgatgtgcagcagaccgacaaattcattgcggtcggcgtcatacaccgggtagcggctgaatttgtggcgacggaacagcgcgaggatttccttgagcggggcattgaagtccagggtgaccaggtcttcccgggagttggcccagtccaccacttccagctcgcccatttccacggcggaggccagcacgcgcatgccttggtcgctcgggtcctggccacggctggagtgcaggatcagcttgagttcttcgcggctgtaatggtgctcatggtgcgggccgggctcgccttggccggcgatacgcaggatggcgttggcgctggcgttgagcaggtagatcgccgggtacatggcccagtagaacaggtacagcggcacggcggtccacaacgacagcaactcgggtttgcggatggcccaggacttgggcgccagctcaccgaccacgatgtgcaggtaggaaatcacgaagaaggcggcaaagaacgacacgcccttgatcacctcaggggactgcacgcccacggcgccgagcagcggctcaagaatgtgcgcaaacgctggctcaccgacccagcccaggcccagggaggcgagggtgatacccaactggcaggccgacaaataggcgtcgagctggctgtgcacggtacgcaggatctgcccgcgccagccgttcttgtgggcgatggcctcgacccgagtggcgcgcagtttgaccatggcaaattcggccgcaacgaagaaaccgttgagcagtaccaggatcagtgcaaaaagaatcatgccgaagtcggcgaagagtgtcgcgagggtgataccaggggaagggtccatgatggggttttgcaggttccgtgtgttcaataaggggtgacagaagggcctgaaaggcaggcgcaagtcggccaatgtagcggctgacggggcgcttgcctagtgcccgctgccgggcggggcctggaaagcactcctccaaacaatacaagttcgatgtgggagctggcttgcctgcgatagcggtgtgtcagttggcatgttttcagctgactcaccgccatcgcaggcaagccagctcccacacctagatttgcgttgtttttgggttattcatcattgccgaccagccgcgaacgcgtcacctgagccggcgggaaatggcaggtaaaggtactgccatgccccagcacgctgctgatctccaggcgtgcacggtggcgcagcaacacgtgtttgacgatggccaaacccaacccggtgccgccggtgttggaattgcggctggaatccacgcggtagaaacgctcggtcaggcgcggcaggtgcttggcgtcgatgccgatgccggagtcctgaacgctgaggtgcgcgccgtattcatcggcccaccagcggatgcggatattgcccttgtcctgggtgtacttcacggcgttgaacaccaggttggaaaacgcactgcgcaactcgccctcgctgcctttgagcagcacctgcgggtcggcttccagggtgatttgctgaccgcgctggccggagagggcctgggcgtcgttcttgatggtctgcaacaggctttgcacggtgaccgggtggttgtccgacgggtaatccgtggcttccagcttggccagcaacagcaggtcgttaagcagcgtctgcatgcgtgaaccttgctgctgcatttgctgcagggcgcggctccagcgcgggttgatttcgtcgacgttgtccagcagcgtctccaggtagccgcaaatcacggtcagcggcgtacgcagttcgtgggagacgttggcgacgaagtctttgcgcatctgttcaagctggtgaatgcgggtcacgtcgcgcaccagcatcaaatgttcgttgttgccgtagcgcgtcaggtacagctggatgcgcacacggtcattggtgggcgaggggatctccagcgcttcttcatagttctcctgttcgaagtactccttgaagcgtgggtggcgcaccaggttggtcactggctggccactgtcctggggcgtcttgaggccgagcagggtctcggcggcgcggttccaccattccaggttgccgtcgctgtcgagcatgatcaccgcgtctttcagcgcggcggtggactcctgcacccggtcgatcaccgcttgcaggcgtccgcgtacccgttggtcgcggcgttgcaggtggtagatgctgtcaaacacctcgccccacaggccgtagccgtcgggtggcgcttcgtcgggtttgtgctggcgcagccattcatgcaggcgcagcagttgcttgagcgtccagcccaggtacaggccgatacccacggccagggcccagccatattggccagtgaccaggcctaccaccagacagccggtgatcaacagaagcatgtggcggatcagggtgccatgccagttttgattcacttgaacatgcgtccttgtcggctgttaaggaaagagaggggcccgctcagcctttggtggaaaagcgatagccagtgccgcgcacggtttgtaccagattctcgtaggcatcgcccaaggctttgcgcaggcggcgaatatgcacgtccacggtgcgctcttccacatacacgttgccgccccagacctggtcgagcaactggccgcgggtgtaggcgcgttcctggtgggtcatgaagaattgcagcaggcggtattcggtcgggcccatctcggccggcttgccgtcgatggtcacacggtggctgatcgggtccaggatcaggccgtcgacttcgataggcgcttcgccatcggtcgggcccgcgcggcgcagcacggccttgaggcgcgcaaccagctcgcgtggggaaaacggcttggtgatgtagtcgtcagcccccacttccaggccctggatcttgttgtcctcttcgcccttggcggtgagcatgatgatcgggatatccccggtcagctcatcacgcttgaggcggcgggccagctcgatgccggaggtgccgggcagcatccagtcgagcaggatcaggtccggcttgcggtcgacgataatggcatgggcctgctgggagttctccgcctccaggcagtcatagccggccatttccaacgcaacggcgatcatttcgcgaatgggcgcttcgtcgtcaacgatcagaatgctcctgccaaccatgcctaaatcctcttgtcatttaactgtcttgcgccgcattagataacggaattattgcagtcgtgtgacagtaatttagtcgctcaggcaaataacggcactctggactaccctttgggtccgaatcctgacaaccaaaaaaggaaggttccgatgacttacagcacgatttcctggaaagccctgctggttacggctgcgttgacgctgccgaccctggcgttcgccgcagagccggcgatgaccaaagacggtctgttggtggatcacaagggcctgaccctctataccttcgacaaggacgcagacggcaaatcagtgtgcaaagaccagtgtgcgaccaactggccaccgctcaaagctgagtctaccgatacgaaagtgggcgattggacggtgatcacacgcgatgaccagaccagccagtgggcctacaaaggcaagccggtctacacctacaaggatgacaagaaggcgggtgacaagaccggtgatggaaagggcggtgcgtggcacgtcatcaagccctgaacctgcggcgctgctgaaatcatcgcgggcaagcccgctcccacacttggaacgcgttccatatgtgggagcgggcttgcccgcgatggcgtcatctctggttaccgaaaggcgtaatccagcacaatccccacaaaaatcgccaaccccgcccaatggttatgcaggaacgccttgaagcacttcatccggtccttgtcccgcgtgtaccagaactcccaggcgaaacaccccgccgccgccagcaaccccaagtgaaaccagccgcccagctcaaaccgcaggcccgccaggaacaggcagaccagcgacaaaccttgcaggctcaaaatgatggtgcggtcggcgtcgccgaacaggatggccgtggatttcacgccgatcctcaagtcgtcatcacggtccgtcatcgcgtaatacgtgtcataacccaccgtccacagcaggttggcgatgtacagcagccaggccgtggcgggcaggtggccggtctcggcggtaaacgccattggcatgccccaggaaaacgccgcgcccaataccacctgcgggtaataggtgtagcgcttcatgaacgggtagcttgccgccagcgccaggccaccgagggacagcaagatagtgctggcgttggtcagcagcaccagcaggaaactgatccccatcagcactgcaaaaaataccagcgcctcttttgagctgatcttgccgctcaccagcgggcgttgctcggtgcgtttcacgtggccgtcgaccttgcggtcggcccagtcattgatcacgcagccgccggcgcgggtcagcaccacgcccagtacgaaaatcacgacattggtaaaggaaggcgagcccttgccggcgatccacagtgcccacagcgttggccacagcagcaggtaaatgccgatgggcttgtccatgcgggtcagctgaatgaaatcccaggccctggggttcaagtggttcaaggatttgagcagacgttggtacatcagcagttctccgggtggtcgtgcaccgcttgccacaggctcggcaagaagatttccgccaccagcacgctcagcgacccccggtcaaaacgcgagcgccgcgcccacaggttatcgagctgggtgtctgcaggcagccactgtcgtgggtagtggcagacttcgatggtctggcggttgaacgcatcgtcgctgaacagcaattcgcccagcgggcggctgccgagtgcgtccatgtgcaagccatctccctgcaaggtgctgcgagcggccacgcagcgggcgaacagccagggttcaccgttgccgtgaaggtaggtttcgcgcacccagccaatggtggccggtggcaggtccagcgctgcgcattcgtcatcgcgcagcggctgccagccttcaaacagcggtgtgatgctgaagctatcattggacagtcgtgtcagccggcgcgtcatcgagccttcgtcaaacagccaattgagggtcaaaggcgcgggcaatgggctcagaaggctctggggcagccattggcaagcatcgggcagggcggttgagtgcggcacagtgagtcaatattggcagcaaaagaggcggcgagcttaccatggtgaccggcacttttgccgtgctgaaccggccccatgcgtcgatcacgcttgcatctgccggccccgatcagtacaaaacgccctgagccgcgcggcaacgttggtctatcgaccgtcggccaaaatgcctggaccctgaggaagcaagtgatgaagaagtggcaatgtgtagtgtgcggcctgatctatgacgaaaaagacggctggccggatgacggcatcgcgccaggcaccctgtggcaggacgtcccggaagactggctgtgcccggattgcggcgtgggcaagatggatttcgaaatgatcgaaatcggctgatctgattttaagaatcgtattacaaggagaacggaatgaacgcacctgtcgtgatcatcggcacaggattggccggctacaacgtggcccgggagtttcgcaagctcgacagcgagaccccattgctgctgatcaccgcggatgacgggcgctcctactccaagcccatgctctccaccggttttggcaagaacaaggaagccgatggcctgagcatggctgagccgggggccatggccgagcaactcaaggccgaagtgcgcactcatacgcgcatcagcggcattgacccgggccacaagcgcctgtggatcggcgaggaggcggtggcttatcgcgacctgatcctggcctggggcgcagaaaccgtgcgggttccggtggaaggtgacgcggctgacctgatcttcccgatcaatgacctcgaagactacgcacgcttccgtgccgccgccgctggtaaacgccgtgtgctgttgctcggcgccggcttgatcggctgtgaatttgccaacgacctgatcctcggtggctatgaaatcgacttggtggcgccgtgcgagcaagtcatgccgaccctgttgcacccttcggccgccgcagcggtgcaagccgggctggaaggcctcggtgcgcgtttccacttggggccggtgctcaaccgcctgcagcgcacggctgacgggctggaagcgcatttgtcggacggcgaagtgattcactgcgacctggtggtttcggccatcggcctgcgtccgcgggtggacctcgctgccgccgccggcctgcaaatcaaccgtgggatcatggtggaccgccacctcaagacctcccacgccaacatctacgcgctgggcgactgcgccgaggtcgacggtttgaacctgttgtacgtaatgccgctgatgacctgcgcccgcgccctggcccaaaccctggccggcaatgccaccgccgtcagctacggcccgatgcccatcaccgtgaaaaccccgatttgcccgctggtggtatcgccaccgccacgcggcaccgaaggcgtgtggagcgtcgaagggcagggcgccgacgtcaaggctgtgtgccgcgacgccagcggccgcctgctgggttacgcgctgaccggcagtgccgtgatggaaaaactggccctgaacaaagaacttccgccgttgctggcgtaaataccggtcgttctgtcggaatcagcacgctcctacccccagaaaggtcgccgcgagactggcgcagcgccttggggcatgccatcctcactcccgtctgccgcagagtagagcctgcggcgccttgggcgctgctccaccagagagcagcacggacataacaacaaaaaaccgtcaaagaggcttcatatatgcgtaaaccagaactcgcagccgccatcgctgaaaaagcggatctcaccaaagaacaggccaatcgcgtactcaacgccgttctcgaagaaatcaccggcgccctgcaccgcaaggacagcgtcaccctggttggcttcggcaccttcctgcaacgccaccgcggcgcccgcaccggcaaaaacccgcaaaccggcgagccggtgaaaatcaaggccagcaacaccgttgcgttcaagccgggcaagtcgctcaaagacagcgtcaacccgtaagagcaggaccgtctgaagggaggcgggacagtaaaaaaaatgggcacgccgactgggtcgggtgcccattttttgtggaggtaacatccaggtggtcttggcccaaacttcggatttcagccagttaatccgtgctggccaggaatatgacgtgttttacctacttaaagatttccactgtggtttccccttcgtaagtttgaacagccattctgtagatgtcggtccagatatcccctgttggtcttgtaacaaggctttttgagccaaatacataaacggtctcgcccagcgatattctttctttgatgtgctgtgccgagggtgaaactgaaaattgatgtaaaaaaaccatcggtcggccttggtggtatagccaggcgggttcacctacccaaacaggtttttcctttaaacaaaggaattctccatccagtcgctctgttaaccatttctttttatttttaggcgagccttgctctacatattcatcgtaaagcgttcgcgcaaaatcctcggcgcactcttcttccatcgacgcggattttttctcggcagcagtcatggccgcgccccagaaaacgtgaaaatcagtcaactcactcataagctctccttcaggacgtctctaccattgccccggggtttttacaattctcaccaagtcccagccggtatgacgatacttgtccatagactcatgcccccaaggcgtagctttggtcaggttccagtcctcgtgagccacttttgagcccgcgcgttgagggatgtattggtggttcagttccattgatacagtgatctccttggtcttgccaacacgtccgagtcgacggctgcgcgcagtgttccgataacgaacctcgaccctcatcctgggcgccttaccctgcgacatccgggccaggtttctagccgaatattggcctggcttggcgttggctgcagccgttttccagacccctttccttgctgtactccagcatttccatccccagggatcgacccaggcaatcgcgttcggcgcatattgatagagattgattccccccgccaatccaagcggatcaggcgtggtaaaccgccctgcatcggggtcgtaaaacctgaacgtattaaaatgcagccctgtttcccgatccaggtactgcccctgaaatcgtaagttctgttcttcgatgtaggcgggcaggcgtgtttcctccacggtgctgccccacattcgataactcgcccgccatacgacctttccgtcctcttcggtcagttgctccggcaggccattgaggtcgttgtggtagtggcggattttttgcaaagggccagtaccatcgacacgcgctacgggcttgtagccttcgtcttcataaatataaaggctggattggctatgcttggtttcctgcaatagacgcagttcatcccagatgaagcgtgtcacgctcagttgatggccatcgctgccatgttcagttttttcgatgcgtcgacccagcgggtcgtaggtcatcctgaccacgctgccgccctgattttgtacttcaaccagtcggctttcagcatcgtaggcaaaccgttgcaacccacgcgcggcactgcgtttttcaatcatccgcccaagagcgtcgtaggtataacgcttgtcctgataagtgagcagccggttatgccgtaccaggccgccctggccggggccgtcgagcaaattggcggcagcatcataggcacaggtttcgctgcaccccacctgatggctaacaaggattcgccccgtgctgtcgtagcccaggtgctcctgacggtcgctacgccgacgctcgatcagattgtcgctggggtcgtagctgtagtcagtctcgacctgcggcggcaactgccacggttggtcaatgccgcgacgctgtcgtgagcgaacccttccacttcgatcataggcggtattcgtcttgagccgaccttgagttcgctgtacttctcggtgcaagcggtcgcgctcgaaatcgctgatgacctgcccatcgagattcagttgatgcaggtgaccgctaccgtagtaaaggcggttcagccatcgaccgtctggcaaaccggttcgggtaaggtttcccagctcgtcgtaacaatgctgtatggccccggctgtgccttgctcttcaatcagttgccccaacgcgtcataacggaaaccgagtgatgtttcactaccatcaagcgcggtgaatgtgacagcgaccaattggtcgttcagatcgttttcgtagacggtggcgccgtctgctgtgactttaccgaccaggcgcccgatcaggtcccgttggaactggtgtttcagtggcgctacaggctcgccctcggtaccgggcagatggtctatggctacaacgtcacccagcgcatcataggcataacagcgccgactctggtcaaggtcctgttgttgcaccaggcggtcagccgcgtcccactcaaagcgatagctttcgtttttctcgttggtcagtttcagcaggcgtccgtaggcatcatgattgaaccggaccgtgcggttatgcgcatcccaacgctgtgtgaccagaccacgcacgtcgtaggcatagcgggaggtactgccggcggggtcgatatagcaggtcagatgaccctgggcattgcgctcaaacttttcaacgcggccatccgggagctggcattccagcaacagaccccgaggcccgtaccggtagcgcactgactcgccctcggcattggtttgcaccacccgattgccaaacgcatcgtactgataacgcgtgggataacccgagcaatccacttcctcgaccaattggctccattcgttccactgcagtgttctggttttttccgtggcatcgatgatgcgaacgggctggccgaacccgtcgtagacataacgtgtgctgttgcccagtgggtcgatttcttcaatgcagttgccacgcgggtcgtagcggtaatgccagctgtggcccgccgggtcggtttccacctcgggcaatgcccagtgggccagccaccgtgtgccgctgcttctggccagtgggtcggtcactgcactcaaattgccggattcgtcgtaactgaagcgccactggccgttttgcgggtcggttgcgcccacccattggcgatcttcgttccagtcgaattgccacgtatggcccaggttgtcgacgtaacgagtgatctgatactgcgggttccaatgccgcgtgctggcccgcatcaggccgtcggtcacgcgggtaatgccggcgtcgagatcgtagtcgaaggtgtattcatcgccggcatcggtccagtggcggctgacgcgccactccgggccatctggcccaggtacttcggcccattggtagaaacagcgcaaaccactcggtaattggtgctcggccatgcgcctgccggcgtcgtaggcaaagcgtcgaagggtcgtcccttgcacgtccaacacttcagccaggtcgccgttgccgtcatagcggtagctgacgagcacatcactgcgcgcatcgaaatgttcctggcgcaggtaacgccgttcgatatggctcacacgccttgggtgttcggccgaatagctcagttctacatgcatcaaatcctgggtgtcgcgcagtcgagacagccgcccttgagggtcgtaatcgaggaaaatccgcccttcattgcgatcgcccagcagctgcaagcgcatccgcgagcagttcagcgggtccggctcgaacagccggtacaggccgtcgatgctctcgatcaataccgcgccgtcgccacttcgcccgaccgcaaggccttcgcccgggtcgaacgcgccgccggacagggggatgtaaccgatctccaggcggcgcccttgctcatcgatgtagaacaggttttcgtcagcgtctatctcgaccgacacctcatacggaacgctccagcccgcgccaaacaggccatcctgacgcgtgtcgaggctgctgtaaaaacgctgccaatctattggaagcaagcccggcagcacgaagtccagctcatcttcttcgcccagtaccttggcgccggtcgcactgtgcaccgggttgggcgatccgttcatagcgcttttgagtgcagacgtgaccttgctcgttccgtaagagattgcgccccccactagcgcactaccgaccaggcacggcagtttggtccaaaaacatttcacgttgcctcgcaacgccatcaccacggcaatcgccaggcccacaccgggggttttcccgctgcgaatctcctgcaccacaatggtctcgccaccgatgcgcacatccggcgagatcagccccttggccgtcccgatcttcgcgtcacaggtactgcgatcaccgctgcgcgctgcaggctgcccattgatgaacaccgagctggaaccctcggcaatgaattgcagaggcatgggcgggtgcttggtgcatgcaacggtgtccagcaggcaaggcacggtgcccgcggcaggggaggcgacggtcggacgccacatctgcgagaaaaactccccggccatgtccaggaagctgggctctggcggctcgctgggcgcaaccggcacagccagcatcttgccagcggcccgggcagcctttttaccgttgatgaatacatcgtccgagccgctggtgataaaggcatcgatcaccggcggaaacacccaattggcggcggactcgcaccaactggatatcttcagatcagcccccgtgagcccggcggtaatgccgacgactgccccaacgaccagaaccaatgcaacgccaccggtggcgatggtcgcgccggtcgcgaggaaaaccgcgcctgcaacggccaggcagccaacagttgtgatcgccgcataggccgccacttccagtacgccgccgagaatatcggccatcaccgaggtatgcagcagcgcgtcgccttcgcgggcagcccagaggtcttcactcatggctcaggctcggctcaaggtgcggcgaggaagttgagggtgcttttaagcgttgcccagtgcgccgcttcggccggccccaggggctgggtcttgacgtaactcagggcgatcagacggcgggtgccgggtacctgcattgccaactgatactggtagatattgtcgctgcctttgttgaaccggttctgcacctcaaaggcgtcgatatcctgcgccgggccgactttgacggcttgcgccggcgaatagcgaaggtctttgacctgctgttcgagcttcttcagctggccctcgaagttgctttgcaggtcctcgccgtccgccaaagggctgcggctgaccaccagtgtggtgcccagcttggcgaacttgagaatgttgatcgaggtgtcctgtacctcggcatcgggcagggtgaattgggcttcgttaatcaggtaattcatggcgaagaaatctcgttattgaccggcgccgggcttgccggggaattttgactcgacggcgttgtggatcgtggcttgcttgccctgattaccgggcgacgtgcccttgtcactgcccaggttgatgtccagtttgccctttgtctggatcttgctgctgcccgaggaaaacaggttgaacgaagcacaggtcaggttgatgtctccgcccgccttcagctcaatgacgctgtcgccgcacaccaggcgaatgctgtcgcccgcctcgacggtataggtggtagcagcgctgtcggacttggcgccgcccaccagcacggtgtcgttgttgcgcaccacccgcacgcggttattgccaatcgtcaccgtctcgttatgcccaatgctcttgttgcggtcatgccccaccgagtggctttcatccacttccaccacgatgtcctgattgcgctcggcgtggatgtacaactgctccaggcccttcttgtcctccatacggatttcattgaagttggccggcgtgccgcccttgctcgagcggcttttcatgccgctctgggtcgcgttttccggcaggtcgtaaggcacggtctgctcggcgttatagacgcgcccggtgatgatcggccggtccgggtcaccttccagaaagctcacaatcacttcctggccgatgcgtggaatctgcatcgagccccagttcttcccggcccaggattgcgacacacgaatccagcacgagctgttttcgttggactggtcatggcggtcccaatagaaatgcaccttcacgcggccgtactggtcggtccagatttcctctcctttggggcccaccaccaacgcggtctgcgggcctttgacgatggggcggtgggtgctggccaaggggcgaaagctttgctgtgcatcgatgcaggtcaggctgctttcgaactgcgccgacccagagccgccgccgctttccaggctttcctgcacgatgtaatagcggcagccgacgatcaggtattcgcggttctggtcctggcggctgaaaccggtcaggctgaacaaatgccctgaacccaggccgcgcgcgttgccggcgaattcgatctgttcatgcagggtttgcagggcttcgatgcgggtgcgcgcgtagtgttcgccgtcggcgctttgcacgtaggtgccggggtagtcgtacagcggatagtcgccggcggtgtgcgggcgcggcatggctgagcgcacatcgatgctggcgctggggcgctggaagtcgtagtcattgagctccagcgagcccggctgtacctcctgcgccaggtgccagttgtgcatgtggtcgcgttcgcgctgctgctcgtccttggggtagtacggaatcgacgcgtagcccggcaccgtggtgtgggcgccgtaggcgtcggccaacaccagcacatggcggtcctgctcgtggcggaagaagtagtaaatgccttcctgctccatcaagcggctgacgaaatcgaagctggtctcgcggtactgcacgcagtattcccactcgcggtacggccggctcagggcgtcttcgaagtcggaaaaacccaggtcgcgaaacacctgcttgatgatctgcgggatgctcaggttctggaaaatccggcaatccgacgtgcggctcagcagccaaaaccacgggcgcagcgtgacctggtaactggcgaactggcccaggtcgatgttctggctgcaacgcgcgacgatgccgtggaagtggcgttcaccgccatccgccagttgcaggcccacgctcatcggcttgccgagcaactggttaaggtcgatgttggcgtcgagcgaagtcagttgcagctcatagttgaacagcctgcccaactcctcgccgccgcccatttcattgagcagcagcacatccggcccgagagggctggtgatcttggccaggcgtgaggcttggttaaaaagcatcgaagtaccttagtcactgaagaaaccgaatccacatgtgggagctggcttttgtgggagccgggcttgcccgcgatgcaggcacctcggtgtgtcagtcacactgaggtgatgctatcgcaggcaagccagctcccacacaagccagctcccacactgaccgcattccaccaatagttattcggcgtcgctgaagtcgtagtgcaactcgttatcccggctgctgatccgcacccccgccagcgccttgccttcgagcatgcgtgtgaggaattcacggctcatgtccggcagcaaactgttggtcaggatcgtgtcaatcatgcgcccgccgctttcggtttcggtgcagcgcgagacgatcaggtcgaccactgcatcgtcgtagtcgaacgccactttgtgggtggtctccacacgcttcttgatgcggttcagttgcaggcgggtgatcgccttgagcatctcgtcgctcagcgggtagtaaggaatcgtcaccagacggccgagcagggcgggtgggaagatctccagcagcggctggcgcaaggccttggcgatttcttccggctccggcacgttcgccgggtctttgcacacacgggcaatcaactcggtaccggcgttggtggtcagcaggatcagggtgttcttgaagtcgatcacccggccttcgccgtcttccatcacgcccttgtcgaacacctggaaaaagatctcatgcacgtccgggtgggctttttcgacctcgtccagcagcaccacgctgtagggtttgcgccgcaccgcttcggtcagcacgccgccttcgccgtagccgatgtagcccggtggcgcgcccttgagcgtcgataccgtgtgggcctcctggaactcgctcatgttgatggtgatcacgttctgctcgccgccgtacatggcttcggccagggccagggcggtttcggtcttgcccacacccgaagtgccggcgagcatgaacacgccaatcggcttgctcgggttatcgagcccggcgcgggaggtctggatgcgcttggcgatcatctgcaaggcgtggtcctggccgatgatgcgttttttcaggtgctggtcgaggttgagcaccgtctccagctcgttgcgcgccatgcggcctaccggaataccggtccagtcggcgaccacggaggccacggcttggtaatccacggttggcagtatcagcggggtttcgccttgcagagcgctcaggcgctgttgcaggtcgaccaattgcgcgcgcaactcatcgttgccgctgtccacaacgccagctttttcgcgcaaggtggcgcgggtggcgagcaattcatccaccagtgttttttcttcagcccagcggctctccagtgttgccagacgctcacgctcggtcgtcagcaaggcttcgctgttcgtctggcgcgcgccaatggcaatgccgatggcatgctcgcgagcgatgatttgcagctcggtttccagcgcttcgatgcgacggcggctgtcgtccacttcggcgggcacggcgtgcaggctgatggcgacgcgggcgcaggcggtgtccagcaagctcacggatttatccggcagttggcgcgccgggatgtagcggtgcgacagcttcaccgaggcttccagcgcttcatcaaggatctgcacctgatggtgtttttccatggtcgaggccacgccgcgcatcatcagcagcgccttgtcttccgacggctcggcgacttgtaccacctggaagcggcgggtcagggccgggtctttttcgatgtgttttttgtactcggcccaggtcgtggcggccacggtacgcaaggtgccacgggcgagggctggcttgagcaagttggcggcgtcaccggtcccggcggcgccaccggcaccgaccagcgtgtgggcttcgtcgatgaacaggatgattggcttgggcgatgcctgcacgtcttcgatgacctggcgcagtcgctgttcgaactcacctttcatgctggcgcccgcttgcagcaggcccacgtcgaggctgcgcagctccacgtctttgagtgccggcggtacgtcaccggcgacgatgcgaagagcgaaaccttcaacgaccgccgtcttgcccacaccggcttcgcccgtgaggatcgggttgttctggcgacggcgcatgaggatatccaccaattggcggatctcttcatcacggccaacaatcgggtcgagcttgccgctgcgcgcctgttcggtcaggtccacggtgaagcgcttgagggcttcctgcttgcccatcgcgctcggcgccatggccccgctggcttctccgggtacggcgccggcgttgaaaccatcgctggcactcaacgcgttctccggcgagtcgccgacgtagtcgtcaaagcgctcgctcagggcctcggccttgatcttgtcgaactccgacgacaggcccagcaaggcgtggcgcaggcttggcgtcttcaagatgcccagaaccagataacccgtgcgcacctggctttcaccgaacatcaggctgccatacacccagccacgctccacggcttcttccacatgggaagacaggtcggtgatcgaggtcgagccgcgcggcaggcggtccagcgcttcggtcaggtcacgggccaggcgcgccggttccacgttgaattggcggatgatgcggtgcaggtccgagtcctgcaattgcagcagctggtgaaaccagtgggccagttccacatacgggttgccccgcagtttgcagaacacggtggcggcttcgatggccttgtaggccacgctgttgagtttgccgaacaaggcggcgcgactgatttcacccatgctctggattccttgaggtggtggcgtggtcggcgtaatgccgggccaggattaggtcgttggcgtcatgcttgggtcggccaagccaagtgttgaagcccaggcggaactggccattaatttgcagctttgggacttcgggttgttgcaaaaccaggttcaagtcccagtccagttcatggcccaggtattcggccacccacgccaccagttcgttgaacggctggctgccgggcagcatgcccatgtagtcattcagcgtgagcggccccaggcggatgcggaatttatgctggcggtcccacacgtggctgcccaggcaaaagtccacgcccagttggttggcgctcacgctgacgcggctgcgttcgggcagttccaaccattggccgacgtactcctcgatctccactggcaggccaaagtattcgctgaggatggccttcaaaccgtccgggtagcgggtttgcgcggacagatgcccgctgtaatgcagcttcgccgtgtcgggaatcagcccctgattgagcaggctcggcatgccccggccactcagggcggcgaggcgtgcggaccagtagtcatcgtccgggcggtcgtggctgaccgtcggccgcgcctcggcccacgcccggtaaaacaggctgagcagacgatggtgaaaaacgtcaaggaactgtttgctggtgctgtcggcattgttgcgctggcgctcgcgcacatactcggtgatgtgcagcggcagcgggccgttggggccgccgaggccaaaaaagaattgctccagccgcgcgggtttaccgtcgccgccggggtcgaccgaagccagggtcgcaggtgcgaacgtgcaatcggcctgctgcccgaggcgcagcgggtcatcggccagccgcagggaatggcccaggcgcggcagctgtggcgattcgcactcgatacgccgcagcgcctggaagaaatcgtattcccagggctcctgatgcatcgcatcgagggtactcacagggtcggacgacgtccgggcttggctttccatcgcatgatctcgccgcgttcggtggtacggatcaccgtctcggtaaaactgttgatcgacacgtaacgtgccaggaagcgctccagcacggcaccgagtagaaacacaccggtaccgcgaaacgcgttttcatcaaattccagggtgatttccaggccacggccaaacacgatcgggccgggcatcggcaggcgccgggtcacggctttgctgctgacctcgcgcaggccttcgatctgcaattgcagggcggcgtcgttgctgtcgccatacaggcgcagcagttcgcgcaaggcgccggcgccctggccttgctcgctcaaggacaaatagttgagcgagagttggctgatcaggcgccaggccttggcgtcatgggcgtggctggcgcgcgggcggctggggccggccacacagcgcacggacaacaccggggcgctgtcggcgagggtgaagtcggtcttgccgttgcccacgctcatgaacagcggtaagtcgcggttggtgcacagcgccgtcacgccgagttggcgcaggtcgtggctgtacggcgcttgttgactgtccaccaggctgacgaaggtttcgctgcccacgtaagtcgagcgcgggccattgcggcgctggtcgctggacaacacccgtggctcgcggcgcagggtgtaatacgcgaagtcgcggccataacgcgatgggtcacgcaccgcataaaacggcaagaacggctgctccggcccggtaccgtggccggtgataccgctcagggaatgaatctcgaaatccatcggccgcgtgcggtcggcaatcacatggtgttcattgacccggtcggacaagtggatacggtccacgcgcttgggaaacaggttgatcgccggggtgcagaacggcaggaactgcgcggcgccgacgctgccttccaggcttggctcgtggcggtcgaacagcacgatcagttccagttcctggccgtcgcagcgcttgaccgcgcggctcagctcggcgaattccacgaacagaaatcgatggggcagggcgaagtattcctgcaacagccgatagccctgaaaggcgcgtgccaccaccggcatggcggcgtcggcatcgtcaaagccacgggagcgcaaggcgtcttgcggcaggcgctccacccaatcgccacccggcttgcgcgcgaacaccgcgcaggcattgccgagcagttgttcgtaaagacggaacggttgttcatcggcgccgctgaggtacagcggcaggctgttcagtgccaggctgctgaacggcaattcggcaccggtacgcaacgtcaggcgcaagcccgccttggctttcggctcgctggcggcgaggcggcccaatacggcggcggggttaccgaagtactcggcattgctgacctgcaacggccacaatgtcaccggatgggcggtgcggtactcgcagcaggtctgggtttcgcggcccaaggcggcgcgcagcacggtgtcgcggggcagggggaaaccgctggccagcgagccctcgtccgggtcggtctgcaactgcaccacggtcatcgacggcgtcggcgccaggtagtgcggataggcgatttccagcaggttgtgggtgaaggtcgggtattcggcgtcgagcttgagttgcacgcgggccgtgaggtaggcaaagccttcgagcaagcgttcgacgtacgggtcggcgcagtccataccggacagggtcagccgactggcgatcttcgggtattccttggcgaactcggcggcgctttcgcgcacgtgctgcagttccctgttgtacagctccagcaggcgcgggttcatgggcgcctccgctggtcggcattgaccacgcgcacgtggccggactccaggtccaggtcggtttgcagcagcaggcgcaacggtaccggctgcgcccacaagtcgccttcgatctcgaagctcagcgcgttgtggttcatctcgccatggccgacacgggctttgacgcgcagggtgtggcgcagaatgcgcggctcaaaggtggcgatggcctggtagatcagggcttccagagctttgatgtcgacgctggacacgctgttgcccgcgagtgccggcaagccgtaattgaccaccgaggtgccggccggggtgtgcagcgtggcatcggcatcgagcaacgaggtggtgttgagcagccacgccaggtcgcgcagcaccgaggctttcaattgggtcagggacagcacgcgtttgtcggcgctttccttggggttggtcgggtcgtcgtcagtcagccggtccagcagggacggttgcagacggtcgcgggaagcgatttcagttaccaccaaagcagctccacggacgggttgcgagagggacaaaaagccttgggccgcggcgtgaagccacggccacaagggctatcagcgcttggtgttggaacggatgttccagccaaacttgatcgcgccgccgtctttggtgccgtcggctttctgcggctggtagtcgaccatcacttgggcaaagttcagggtgacgttctcggtcaggcgatcatcggtgcccgagccgcccgtgctcagggacgtgaccagcacttcttccaggttgatcaccatgtactcgacctggctttcgccaccggccttgcgcacggtcagcttgaccttgtcgatgtgcttgccgctggcgcagtgcatcatcaggttgggggaggccttgtcgacgtacttggtcagcgacaggtcctggatattcaccttgcccgcgccgccgccaccgcccacatgcatgttgccggactgggccatgccccagctccagttcagcacgtcgatttcgtccttgtgggccttgtccatggactcgcccttgatgtcgccgatcttgatgaaaatatcaacagccatgttttctccctgtgtggtctcagccacagtatttggttaccgccaatggggcagcgcttttctgtgggagctggcttgcctgcgattgcatcaccgcggtgtgaccggcagaccgcggtgcctgcatcgcgggcaagcccggctcccacagaagagctagcacttccgtgccttaggcggatttcgccgaaggcagcttcgataccaggcgcaacgacacggtcagcccttcaagctggtagtgcgggcgcaggtagaacttggagttgtagtaccccgggttaccttcgacttcttccacgatcacttcggccgcagccaacgggtgctgggccttggtggtttcggtggagtgcgcagggtcaccgtctacgtagttgaggatccagtcctgcaaccagcgctgcatttcgtccttctctttgaaggaaccgatcttgtcgcgcacgatgcacttcaagtagtgggcgaaacggcaggtggcaaacaggtacggcaggcgcgcggccaggttggcgttggcggtggcgtccgggtcgtcgtattcggccggtttctgcaacgactgggcgccgatgaacgcagcgaagtcggtatttttcttgtgcagcagcggcatgaaaccgttcttcgccagttctgcttcacggcggtcgctgatggcgatttcagtcgggcacttcatgtccacgccgccgtcatcggttgggaacgtgtgcgccggcaggttttccacttcgccgccggactcgatgccacggatgcgcgaacaccagccgtagtgtttgaacgaacggttgatgttcaccgccatcgcgtacgcggcgttggcccaggtgtacttggagctgtcggcgccgtcggtgttttcttcgaaggcgaaggcttccaccggatcggttttggcgccatacggcaggcgcgcgaggaaacgcggcatggtcaggccgatgtagcgcgaatcttcggattcacgcagcgagcgccagccggcgtattccggggtggtgaagatcttggtcaggtcgcgcgggttcgacagttcctgccacgagcccatacccatcacggtcggcgaggccgcagcgatgaacggggagtgcatggcggcgcagactttcgacagctcgcccagcaactccacatcgggaggcgactggtcgaagtagtagtcgcccaccaggcagccgtacggttcgccgccgaactggccgtattcttcttcgtacatcttcttgaagatcgggctttggtcccacgcggtgcccttgaatttcttcagggtcttgtgcagctcaggcttggagatgttgagcacgcgaatcttcagctgctcatcgctctcggtgttgttgaccaggtagtgcaggccacgccaggcgctttccagctgttggaaatcctggtgatggatgatttggttgacctgggcagtcagcttggcgtcgatggcggcgatgatcgattcaatcgacttgatcgcgtcgttggacaccaggtcggtttgcgccagcgcctgttcggccagggtgcgcacggcggtttccacggcttcgcgcgcacgctcggtcttgggcttgaactcttgcagcagcaggttggcgaactcgctggcttcttcggtggcacccagaatctggctgccttcgcgggcggtattgtcggtcatgattactggtcccctgccggcttcggcgcgctcgcaagggcctgcagcagtgccgggtccttgatcgctttcatgatgatttcctcagcgccggtcttgccgtccatgtaggtcagcaggttggccagctgggtgcgggcttcgagcaactggttcagcgagtcgactttgcgcgctacagcggccgggctgaagtcgtccatgctttcgaaggtgatgtccaggctcaggttgccttcaccggtcagctcattcggtacgtggaaggctacgcgtggctgcatggccttgaggcgcgagtcgaaattatcgacgtccacttcaagaaacttgcggtcggccacagcggcgagcggctcggcgggcttgccggcgagatcagccatcacgcccatcacgaagggcagctggacctttttctcggcgccgtaaagctcgacgtcgtactcgatctgcactcgaggcgcgcggttgcgcgcaatgaatttctgagaactttgcttcgccacgatgctgctcctggtcgcttgagcgacagtgttgttactgcacggtccggcggcttattcgctgtccgggccgcgcaggttttcaaattgggacatgccgtcgggaatcagattgcgcacgatggccgcgaagtcggcgtgcaccagatgcttggcccggttcaacaacaccggcagcgggctcgaaggctcgtgccgggtgtagtacgcgagaatcttgtcgaggctgcgcagcacgtcgtcgcgggtggcgatgtcgccagcggggcgaggggctgcgggggcggcggcgtaatcggccgagggggcattgtcgtcactgacaacctcgggttcgccgctgctttcggtgccgggcaccgcttgattgagtaggttcagggcctgcttgagcggttgcttcaagctgctcaagtccacgccttgggcggaaccgacctggtcgttgacctgttgttcgatggcttcgcacgccgcacgcgccgcgctcagggcatcgcgggtggcttgcaattgttcggggtcactgtcgaggaacgccgcattgagctgctgggcgccgagttgttcatcggcaaaaatctgcaggccgctggcgttgagcgccgcgcgcaggctgacgggcccgaaggtgcgcgagcgtgtgaggatgctctcgcgcagcagacgaatggtggtgtcgctcgtcaggccggacagcgcgttgacgcgtacggtggggtcgttatcgtcgtcggcgtccaggcgtgggtgcaggtcggcccagtattcgcgcagcaacgcgttgatcagcgtgagggcttcggccagccccgccacaccctggagggcgagggtgctttgcagcaaaaaatgggtgatgcgcaggtctttgctgcgcgcgagcaagtcgaggctttgctgctggatgctgcgccattccggcggttcggcgggcaggatggagtcgcccatgctgcgctcgggttggcccttggcgtcacgttccagctgaagaaattgcgcgtcatattccatgtcttcgccacatggcgaagtcgcggaaacggcggcgagcagcaacggcacatccacttgattcgatctccctatcagcccgttagatggcgggcagttcatgccttagttgcgtaatgaactttgcatgttttcctgatcatatagtcagagtgccactaatgtgccatcaatgatgttcaagaagttgtgcatttttggtgtagtagttgggccttgtcaaggtaagctattcgccctctgtgacagatgtgcggtgcttaacaacctgcacgactggtgggtcgggtgacgcaccggaacaggatttctgtcatggaggccggttaagatcagcgatcatgctggtaaaagccggttgcaagggtcgtttgcacgatctggtagggattgcccgggaagtgttgccccgggcgtcgactgcgcgcgaagtatcagcaaggaggcaagatggcgctgtgtttgactatcactagttatcacaagattacccctgggcagtgccccgaaaagtccttgaaccagggctcgatggcgatcggccgcagttcggataatgactgggtattgcctgatccagagcgtctggtctcttcgcaacactgtgttattcaatacaaagagggccgttattatttaaccgacaacagtaccaatggcgtggagttggttaacgccggtattcgtttgcgtcggggtaacagcgaactgttacaagatggcgaactgatccgtatcggcgattacgaaattcaggcgcgcatcgacttcaacgtgcaagccgttgatagccaaccctttgccaatgaatcaccgaacagttttgaagcgctgatgggcgccgtggtgaacacgcccacgcctgtgccggtgatcgcgccgcagtttcagggcgcctcgtcgatggacaccctgccagacctgttcgactttctcggccccaccgccgtaccgccgccgaccgtggcggatcacgtgccctccgagcagcacgatttccggccgccgacgccggttagcgttgaaaaaccggtggtatcgggctctgtgattcccgacgactgggacctgtttgccgatacgccgccagcccccgtcgcgccgccgcccgccgctgtcgtccagccgccacccgtggtcgagcccgtgctccccgtggcagacagcggccaacaacccgacctcctgcaagctttcctgcgcggtgccggcctcgaccaattgcgcctcgacaaggcccaggcagaagcccaaatggaaagcatcgggcgcagctaccgcctgatggtcgaaggcctgatcgacgtcttgcgtgcccgcgccagcctcaagggcgagtttcgcatgcagcaaaccatgattcgtcccgccgaaaacaatccgttgaaattcgcgccgaatgccgacgaagcgttactgctgctgcttcgtcacggcaaccaggcgtttatggcgcctgacatcgccgtgcgcgacagtttcgatgacctgcgcgcccatcaattggcggtgatggccggtgtggaagccgcgatcaagcacctgctggcgcgcttcgaaccggggcagctggaagagcggatgggcaagccgggcgggctgtcgagccttttcaacggctcgcgccaggcccagtactggcagcagttcaccgagctttacagcaatatttcccgcgaagcccaggaggatttccaggacctgttcggccgcgaattcagccgggcctacgaagaacacagcgcacgacagcgacgctaaaacgcgtcgcaaccatggataaaacggatagctaagtacgtcattgaggacgcaggatgattcccaggtttttactcgcagttgccaccgcgttgctgttgacggcgtgtgccaaggatgccgccaaacccgaagccgccgcccaggcggatgccgacacggccgccgtcgaattgcacttccacgccattgccgggctcaaccccggcgccaacggccacgccgccccggtgcgggtgcgcattttcgaactgaaaaacgctgccaccttcggtcgctccgattacttcgccctggctgaccgcgcgcaatccaccctcggcctggacttgcttgaccaggacgaagtgatggtccagcccggccagcagctgagcattaaacgcgacctcgacccgtccacccgccagatcggcttgctggtgggctatcgcgaactcgaccgtgcgcaatggcgcacggtgatagacgtgccggcgcgccaatacaccgaataccagatcagcctcgatgtgcacgcggtgcgtgccgacgtcgtggttccccccgcaagcactgcccaataacaagagatcggagcccccatgtcctggaacaatcgcgtggtctggtcggaaggcatgttcatcggaacgcagcacttccagcagcatgaccgttacctggaaaacctgatcgacgcgcgcagccgcccgttgtccgcaggggcctggggtttttccgagttgctgatcgatcagggcctgctggcccagggcaagctggcgattgtgtcggcgcggggcctgctgccggatggcacgccgttcaatattccccaggatgatgtggcgccgagcccattgagcattgacgacagcctgcgcgacgggctggtctatctggcgctgccgctcaagcgcgcgggcgcccgtgacaccgtggatgaaggcgaagcgctggaagcggcgcgttttgtcagccaggtgcgtgaagtgcgcgacgataacgcgccgttcgaaaaccgcgcgcccgtggccgtcggctcgcgcgccttgcgtttgctgaccgcgcaggatggcgtcagtgattacgccgccatcggcctggtacgcatcaaggaaaaacgtgccgaccgcgcgctggtgctcgacgacacctacatcccgcccgtgctggatgtggtggcgagcaagccgctgacggcgtttcgcagtgaactgctcggcttgctgcaccagcgcggcgaagcgctggcgggccgcgtggtggcgtcgggcgccggtggtgcgtcggaaattgccgacttcatgctgctgcaactggtcaaccgcgcccagccgttgatccagcatttgagccagttgagcccgctgcacccggagcgctttttcagcgagatggtgagcctggcgggtgagttttcgaccttttccacctccggccgtcggcctcaggaatacccgcagtaccaacacgacgacctggccctgagctttgcgccggtgatgcaggcgctgcgtgaagcgctgtcgatgctgatcgacagcaaggccacgccgattccgattgtggaaaaagcctatggcattcacgtggcgatgctggccgacaaaaccctgatcgacaacgccagtttcatcctcgtggtgcgcgccgatgtgcccggtgaaaccctgcgcgcgcgtttcggccagcagagcaaggtcggctcggtggagcacatccgtgatttggtcaacctgcaattgccgggcatcagcctgctgccgttgccggtggcgccacgccagttgccctaccacgcaggctccacctactacgagctggaccgtggcagcgagcattggcagcaactgagcaactccggtggttttgccttccatatcgccgggcagttcccgggcttgaacctggccttctgggcgatccgaggataaaccgcgatgcatcccaatgatgatgaacgcacccagttcatgccgcgtccgggtggccgctcgcctgagcccgcacgtgcggaaccggcccctttgtccatgcccgccgcgccgatgctcaccggcaagagccatggcctgaacccgctggaaagcgccgccggcccgctattggccttgctgacgcgcctgcgcaacactatcgcccatccggcaccggccagtttgcgcgcacagttgctggcctacctgcgtcagttcgaagagcgtgctgaagctgccggtgtggcgcgtaacgaagtgctgctggcgcgttacgcgctgtgtaccgcgctcgacgaagccgtgctgagcacgccatggggcagcaccagtgactggggcaagcagagcctgctgatcacggtgcacaacgaagcctggggcggcgaaaaggttttccaactgctcgaccactgcctgcaaagcccgcgcgaacgtttgtacctgctggagctgttgtacctgtgcatgtgcctgggtttcgagggccgctaccgggtgatgaacgacggccgcagccatttggaagcgttgcgcgaacgcaccgccgccgcgattcgcagtgcgcgcggcgaacacgaacgcgagctgtcgccgcactggcggggcgtgaccgtggcgcgggaccgcctggcgcaattcatgccgccgtggatcgccgtggccatcggcctggcgctgctgttggcgttgctgttcgggctgcgcatgaagctggcgtcggatgcggagccggtgttcaagaatatccatgctctgggcgagattccggtgcaggccatcgaccgcccggtggcgcagccaaaagtggttgaacggccgcgcctggcaggttttctggtggaagacatcaaggccggccgcgtcgccgttgaagataaagtcgaccgctctgtcgtcaccattcgtggcgatgaactgttcgcctccgccagctccagcatcgtcgatgactaccagccgctgatgctgcgcatcgccgacgccatccgcaaggtcaagggccaggtgcgcgtgaccgggcacagcgacaaccgcccgattgccacgctgcgcttcccgtcgaactgggccttgtccgaagcgcgggccaaatccgtgctggacattcttgcggccaagaccggtcaggcggaccgcttcagcgccgaaggccgcagtgacaccgagcctgtggcgaccaacgccaccgcagaaggccgtgcccgcaaccggcgggttgaaatcaccatattggcggagggcgtcgagtgaaggcgtttttcagtttcatgattcgctgggtgatccccgtgctgggcctgctcgccctgagcctgatcatctggtttgtcgggccgctgctcgacgtgctggtgcccgaagggcgccgctgggcgctgattatcctggtgttcgcggtgtggattgcctaccgcgtgttccgcatcatccaggcgcgccgccaggccgccgaagtgctgcgcagcctggcagcagaaaccccggcggaccccaacagtgtggccaccgccgaagaactcaccaccctgcgccagcgcatggacgaagccctggcgctgctgaaaaaggccaagctgggcggtgatgagcgccgtaacctctacgagttgccgtggtacgtgattatcggtccgccgggttcgggcaagaccacggcgctggtcaattccgggctgcattttccattggctgcgcagctgggcgccggagcggtgcgtggcgtgggcggcacgcgcaactgcgattggtggtttaccgaccaggccgttttgctcgacaccgcgggccgctacaccacacaagacagcaactccacggtggataaagcggcgtggctgggctttctcgacctgctgaaaaaacagcgttcgcggcggcccatcgacggtgctttcatcgccatcagcctgtcggacctgctgctgggcaccgacgctgagcgcgctgcccacgccgctgcgatccgcctgcgtatccaggagctgtacacccaattgggtgtgcgtttcccgatctacctgatgctcaccaagctcgacctggtgccgggcttcatggagtttttcgacaacctgagcaaggaagaccgcgcccaggtgtggggcatgacctttgcgctggacgatggcaaaaacagcgacagcccgctggctcatctgcaaagtgagttcgccgggctggagcagcgcctcaatgagcgcctggttgagcgtctgcaacaggagcgcgacccggcgcggcgtgacctgatctatggcttcccacagcaattcggcgccttgaaagattgccttcagagcttcctcgaaggcgtgttcaaacccaacgcctatgaagagcgcgtgctgctgcgcggcgtgtatttcaccagcggcacccaggaaggcagcccgattgaccgcctgatcggcgccatggcccagagcatgaacctggaccgccagcacctggcgcgccagagcggcaccgggcgcagttacttcatcgaaaaactcttcaccgccgtggcgtttgccgaacgtggcttggtcggcgtaaatccgaaggtcgagcgtcggcgcaagtggatcgcacgcggcgtactcgcggccaccgtggcgctggtcgttgtcgtcagcggcctgtggtgggtcagctaccgcgccaaccaggcgtatatcgcgcaggttgaccagaaggtcgcgccgctgggccaggcggtgcaaaccctcagcccggcgcagcgcgacgtactggccgtgttgcctcttttgaatgcggtgaaaggcctcgcgggcgattcgccgagttgggccgagggccttggcctgtatcagggcgatatgcttgaagccgagtcgggcagcgtctaccgcaagctgttgatcgccgtgttcgcgccacgcctggtgacgcgcatcgaagagcaactgcacggcggcggcaattccgacttcctctacgaaggcctcaaggcctacctgatgctggccgacaacgagcattacgacccggacttcatcaaggcgtggatcgcgctggactgggaccgcaacctgccgcgcgacctgcccgccgatcagcgccaggcattggccactcatttgcaggccttgttcgaccgccacccgccgagcgcgcgcctcgaccctcggctgatcgacgacctgcgtcggcagttgcaacagttgccggtggcccagcgcgtctatgaccgggtcaaacgccagaaactgcccgaaggcatcccggattttcgcctcagcgaagctgccggccgcgacgctgcgctggtgttcagccgcaaaagcggcaagccgttgggtgagccattgagtggtttcttcaccgccaagggttatcgccaggccttcttgctgagcagcctgaaccagaccggcaccctcgccgaagagcaatgggtgctcggccgtgagcaggccgatcagcaaaacgtggtgagcctggccggtgacgtgcgccgcctgtatttccaggactaccaacgccagtgggacgccttgctcgccgacatcgacttcgtgccgatcaccagcgtggcccaggctgccgacgtgctgcgggtgatttccggcccgacctcgccgctgaaaaagctgctggtggccgtggccaaagaaactgacctgcaagccgaagaacgccagctggctgccaagggcgtgccggtggaaggtggcgtagacaagctcaaggagcgcctcggcagcctgcttggccaggagcaacaggcggccagcaaacccgaagcggcagatgatccagtgaccgcgcactttgccgaactcaacggcatcgtcagcaaaaacgaaggcgagccggcggccatcgacggcctgctggccgatatgaacgcgctgtatgtgcaggtcagcgccatggttggcgccagtggcgacgcgttgctcggtgaggcgaagaaccaggctgcggcggcggccacgcgggtcagcctgaatgccgagcgccagccgccgttggtgcaaggcatggtcaagtccgtggtcaattccaccaccaacagcatgatgggcggggtgcgtaaccagctgaacgcagcctgggtcagcgaagtggtgaatgtgtatcgccagtccctggccgggcgttatccgatgtcgccgggcagcgctcgcgatgccacgctggatgacttcggccagttcttcggggtaggcggggtgatggataactacttccgcaaatacctgcagccttacgtggacacctccacccagacctggcgctggcagccgggcgcggcgcaaaaactcgggattgcgccgggcgtgctgcaaaccttccagcgggcggcgacgattcgtgacgcgttcttccgcgccggtggcactcagccaattgtgcgttttgaactcaagccggtctcgatggaccccaccatcacccagttcctgctcgacctcgacggccagcaattgagctatgaccacggccccagtcgcccggtggcgatgcaatggccgaaccccggcagcattggcgtggtgcgcatttccatcatgccgccatcggccagcgggcgttcgggcgtgaccctcgacgggccgtgggcctggttccgcctgctggaacaatcggacctcacggcgggtaactcaccggaccgcttcaacctgcgcctgcgggtcgatggcgcgagcatcgcctatgaattgcgtgcgaacagtgccttcaacccgttcaagagccgtgtgctcagcggcttcagcctgccggagcggttatgacggcgcccggtttctacggcaagttggccagccgcggggactttgtcagccgcgccttgccccagcgttttatcggcccgtgggacagctggctggcggcgggtttgctcgccagccagaacagcctcggcggcgactggctaaacgtttacctggtcagcccgctgtggcgttttgtgctggcgccgggcgtgtgtgggccggacgcggcggcgggcgtggtgatgccgagcattgaccgggtcgggcgctatttcccgttggcggtggtggcgatgctggatcacgacaccaatcccgcttccttggtcggcggcccggacacgtggttcgagcaggccgaggagctgttgctcagcactctggatgccggtgccacctttgaacgcttcagcgatggcgtcgacaaccttggcactccagccagcgagccgcgagcagcagacagccgctttgctggcctgcagcgggtggccgccacagtgcctcacactcgaatgaccgcactcgcagaattggcctgcgaaggtgcgagcttgtggtggggccgaggctccgaacgtatttcccccggtttattgcggtgccagggtttgcctgccgccggcgattttgcgcagtttttgcttggccaagaaggtgtggtgtagatgggctcgacgttcaaatccgcaagcaaaagccatgtgggcatggttcgccaggtcaacgaagacgcgtgcctggacctgccggaaaaccgcctgtgggtggtggccgacggcatgggcgggcatgcggcgggcgactacgtcagcagcctgattgtcgacagcctgcgcacggtgccggtgggccgctccctcgatgaatactcggcggcgctgcgcaatgacctgatccgcatcaacgccaccgtgcgcgaagaaaccgccaaccgtggcgtaaccatgatgggcagcaccgtggtgctgctggccgcacgcgggttgcgcggtgtgtgcctgtgggccggtgacagccgcctgtaccgcctgcgcgacggtgtgctggaaagcatttcccgcgaccacagttatgtacaggacttgcaagacagcggtctgctcagtgaagccgacgcccgcgtgcacccgcgcgccaatatcgtgacccgtgcggtgggcgtggaagcccagctggaactggcggtggccgacttgctgatcgcccccggggacagctacctgctgtgcagcgatggcctgaacaagaccgtcgaagaccatgagattcgtgaagtcctcggccacgacacgccggatgaaatcgtgcgcagcctggtgcacctgggcctgaaccggggcgcgccggacaacatcaccgccattgttgtgaaggtgtcgccatgaacatcctgataccgggctatgacatcgaaggcgagatcggtgaaggcgccatggccagcgtgtacctggcgacccagcgctcccttgagcgcaaggtggcgttgaaggtgatggcggcggcgctggcggccgatccgagtttctgcgagcgttttttgcgcgagggcaagaccctggcgcgcctgtcgcacccgcacacggtgaccatccatgacatcggcaatgtcggtgagctgtattacatggcgatggaatacctgcccaacggcacgctcaaagaacgcatcgccgccgggctgacgccggagcaggggctcacgtacatccgccagattgcctcggcgctgggttacgcccacgcccaggggctggtgcaccgcgacgtcaaacccgccaacattctgttccgcgccgacggcacggcagtgttgtcggacttcggtatcgccaagtcgctggatgaccgcacccaattcacccaggccggttttgccgtgggtacgccgagctacatgagcccggaacaggcccggggccaggagatcgatggtcgcgccgacctgtatgcgctgggcgtggtgctctatgaaatcctcgtcgggaagctgccgtataacggcaccgacgcgctgtcgacggcgctggcacacctgaccgaacccttgccggaattgccggtgcaccacgggcgttatcaggatgtgttgcgcaagctgctggccaaggacccggccgaacgtttcccggatgcggcggcgcttttgcgggcacttgatcaactgccgacggactcgccggaagccacgctggtgcggccgctgccgattccactgagttttgatttgggcggtatcacgcccgagtccatcgaaatcccgaccgacaagcctcagtccgtgcgccaaccggtggtgacgccgacgcagcaccgcgccgtgtccgagcaacgccgtggcccggtggtggcgttggctgccgtggccgttgcggtggcgctggccattggcggcgcaagttattggtggttaagcgccagcgaggcgccggccaagccgccagccgccgtgatcccggaaacgccgccgcctgcgttgaaacccgtggtggctgaagtcgatggtgaccagcgacctttgctgatggccggcaaaaagaccctgttccagcgtgtgctcagcaagcccggcgcaaaactctcccatgacgctggcggcgcatcaggcgaggggctggcggcgttttccgtgctctacgtttaccagcgcaaggacgtcgatggcagcccgtggttacgtgtgggcacggccactgacgggcgcagcgacggctggctgcccgcctcgcaagtcagcgattggaagcagagcctggtgctcaagttcaccgagcgttcgggtcgggcgccggtgatgttcctgcgccaatccgctgaagttgaacagctgttggctgaccctgccgccgccaaaaaagtgctggccaaggcgcagacaaacagcgaagacaatcagcaagtgttggcgctggaaccgaccgccagcgccgtgccgcagaaccagttctacctgttgccgatcttcgactctaaagagagcttcgacgaaaacggccaaccggtgcagttgctcaatgtggcgtccattgatcccggcagcgtggcggccaagcccgccgcccggacggtcagcgccaatgccgacgccttccgtaccgccgtggtgctggtggtggacaccaccgtgtcgatgcaaccctacatcgaccaggttcgcgacgtggtgcacgagttgcaaacccgcattggcgaacggggcgaactcgacagcgtgagcttcgggctggtgggctttcgcaacagcatcaagaaaaccccgggcctggaatacgtggccaaaaccctgatcaccctggatcaggggcgcgacccgcaacgctttctcgacatggcgcgccaggtcaaagcgtccacggtgtccagccattcgttcaacgaagatgcgtttgccggggtgatgcaggcagtggacggcatggactggtccggctacggcgggcgcattattttgctggtcaccgatgccggtgccctgcgcaagaatgacccgttcgccaccacccagatgaacgaggccgaagtgcgccaggccgcgttgggcaagcagatcaagatttacgcgctgcacctgcgcaccgacgccggcaagaaaacccacgcgggtgctgaaagccagtaccgcgtcctgacggccgatgccaacccgcaaatcggcgacctctacacgccagtgccgggcggcgatgtacacaaactgggcgagcgtgttgacgagatcggcagcgtgtttgccaaccttgtgcaccaggtgcgcagtaacacgccgcaaccggtgccgttgttgagctcggcgccgagcctggcggacaagtccgccgccgtcggctacgcgatgcacatggatttccttggccgcaaaaccgcgagccaggcgccgcaactggtcagcgcctggacggccgaccgcgatctcaccaacccggcattgccggcgttccaggtgtgcgtgatgctgaccaagttgcagctcaacgacctgcagcagtcgctgaaactgatcgtggacgcggcgcgcaaaacccagacttcacccaaggatttcttccaggaaatcgccagcgcctcggcctacatgagccgcgacccgcaggccctgcgcaagggcggcaacctcgccgacggtggcattctcggcgaatacctggaaggcctgccgtaccgcagcaagtcgctgaacatgacgcaggatttgtggctgtcgctgagcgtggctgagcaggaagactttatcgacgaactggattcgaaaatccgcctctatgaaaccttccacaatgacctggccaattgggtccgtttcggcgatgccgagccgggcgacgcgttgtaccgcgtgccgttgtcgacgctgccttgatgttgaacctgagcgcggtgcacaagagccggggcgttggaagccagcgttatagcctggcgattccggcgttgacgctgcgcgcgggtgaacaactggcgattgtcgggccgagcggttgcggcaaaagcacgttgctcgatctgctggcgttggtgctggcgccggatcaggtggggcagtttgagttcaatcagcaggatatcggtgggctgtggcgggcggatcagcagtccaggttggccgcgctgcgcagccagcatctgggctatgtgctgcaaaccggcgggttgctaggctttctcgatgtgcgcggcaatattgcgttgtcccggcaactgctgggtttgaaggatgacggcagcgtggcgcggctggctgagcagttggaaatcagcgatcagttggccaaaaaaccggccgcgctctcagtcggccagcgccagcgcgtcagttgcgcccgcgccctggcccatgcgccgcaactggtgctggcggacgagcccaccgcttccctcgacccgctgaacgccgagcgtgtgatgcaggccctgctggcccaggcccgcgagcaccgcgcggcctgtgtgatcgccacccatgacgaacccctggcccgcgccagtgggttgcaggtgcggcgcatcagttgccgtcgcgacagcgatggcggcgtcaccgccaccctcggggaggcgtgctgatgcgcatcggtctggtggcgtcgctggcttggcaggattaccgcaacgacgcgtggctgtcagcgtgttcagtgctggcgttggtcgccgtcattgcgccgttactggtgttattcggcctgaaatttggactggttagcagtttgaccgaacgcttggagaccgaccccgccacccgtgaaattatcccgttgggcggcggtcgattcagccatgcattcatcgagcagcttggcgagcggggtgatgtggcgtttgccattgcgcggacgcggcagattgcagcgacggcgcaggtcggcacgttgacccttgagatgctgccgaccgcgccgggtgatccgctgttgagcggtttgccggtgcccagggggctggaccagatcgtattgagccacaccgccgccgaaaagctcgcggcgcggcctggcgactggctggaagccggctttgcacggcaagtgtcagggcgagttgaagctcagcgtacgcggctgcaggtgctggcggtattgccgttggaagccttcgcccgggatggtttttttgccgatttgagtgtgctggaagccgcagaagattaccgcgatggccgtgcagtgccagcgttgggctgggacggtgaagcggtcggtgtgaatgagcagcgcgtgtacccggcgtttcgcctgtacgcgcgcaacctcgcggatgtggaagcgctgcgggtgtatttcgccgcgcagaacctgctggtgtcgacccaggcgaacaccatcgcgcaggtgcagtcgttgagccgcaacctgtcgattgtgttctggatcattgccgggctggcgctggccggggcgtttgcagcgatctttgcgggggccctggcggcggtggcgcgcaagcgtcgcgaattgtcggtgctgcgcctgttggggttttccaccggcgggctgttgttgtttgtggtgctgcaagcgctgtacagcgcagggtttgcagccgtgctcagtgccggcctgtatggcctggccgaggcggctttaaacaaattgttcgtgcaggtgccgggcgaatacgccagccacctgttggcgcgtcattacggcctggccctggttgcaatcctcggcgtcagtgccgtggcggcggccagtggtggttggcgagtggcgcgtatccaggcttctgaaggaatcagagatgtttaagttactgggcgccgccgtggcgctgagcctggcctcaatggcctgggccgatgaggcgagcgacaagctcgacaaccccaaaccgctggcggatgacgtgagcctgccgctgccctgcgagggcaacatggtgtttcgttacgcctacgtgttggcgcagggcacgctggatgaccgcgaaatcagcctcggctaccccttcgccgagggcgaggcgggttatcagcaatcgtttatttccggctaccgccgcgacttcatcaacggccaattcaccctcaaggatttgccgaaagactggaacaaggtcatcgcgccgctgatgccgaagaccgacgccaagacgccgctcaaaccgatgctgtatttcatcggcaagtacgaagtaaccgcgcgccagtacgccgccgtgatggcgcaggcgcaatccctggccagcggcgaacccgcgccagcctgcgaccttcccaccggcatggccgcgcgtttgccaaaggtgaagctgtcgcgttttgaggccgagcgtttctcggcggtgtacagcgcgtggctgatgaaataccaccgcgacctgctgccggtgagtggccgtggttcttctgccgaagacggtggcctgggctttgtgcgcctgccgactgaagtggagtgggaattcgccgcgcgcggtggccaggcggtgagccgccaggacctggaaggccgcctgtttccacggcgtgtcgaaggcagtgaaagcgacggcccgctgggcgactacgcggtattcaaccaggtcgccggcggcaccggtcaggccgcgcggctgatgcccatcggcaccaaactgcccaacccgatcggcctgttcgacgtgattggcaacgccgccgaaatggtccaggaatccttccagctggtgcacgccgggcggcgccagggcacttacggcggctttgtggtcaagggcggcaactacctggaaggcgagggcacgctgttcaccggcatgcgccgcgagtacccgttgttcgccgccgacggcaccgaacagagcaacgaaaccacaggctttcgcgtagcgattggcgcgctgtcggcgccgcgttcgcgctacaaggaattgttcgaacagtggcaaaaagaaggtcgcttggcctcgctgactgacgccatcgatgatgcccaggacccgaccaaacgtctggacagcatcatcgccggcagcgtcgaccccaagctgcaagccgaactcgggctggtcaacgaagagctcaagcgcaacgtttcgttgatcgcccagcaacgcgaagaggcggcgggcaacctgattcagtccgccgcgttggtggccgagaccatcagcaattacaacatccgcctggccaacctgcagaagagccgccagcaagccaaagacaacaaggacgaggccagcgcgcagttgtttgacatggccatcaccaatggccgcagcgccctcgacggcgccgtggcgatttatatcgacaacctggccaccggcacgcgttacaccgatgcggtgatccaggcgcagtttcaacggatcaaggaagagttggatcgcaagccagtgctcggcaagagcctggtgacgcgcgcgacactgttcgttcgccatgtcggcaactaccgcaagcaacagcgggccgacccggcaacgatcttgaaggaattgctcgcagcgagcggtcagcggtcttgaccggtggctgtaaagcgagcttggaagggactcaggcggcggtgggccgtgctgggcaagtcaaacttaaaagagaacacacctatgcttttttcccgtaaggcggtttccaagcgtcacctgctgctgatcgcagccggtttcagcaccgtgttgaccggttgcgccacgtcgccagcctccaaggtcgcgtcgagcaccaaggtcgagtactacccgaactgctacgagccggtacagcacttgcgtgcgactgattcgaacatgaccaagtcggtcgtgaccggcgcggcccttggcgcagcgggcggtgcactgctgggcgccctgaccggcgactccgacaagcgcgggcgtaacgcggcgatcggcgcagcgggcggcgccctggccggcggcgcggcgggttactacaccgagcgccagaagcagatcaccgatgacaaccagcgcatcgcgtcgtactccaccgacttcaacaaaagtgcctccgacatcgaccgcagcactgcctacgccaaggcgtcccagcagtgctaccagagcgcgttcaccaaactggtgaatgatcgcaaggccaagaccgtcaacgacaccgaaggccgcaagcgcctggcggaaatcgtttcgggcctcaaagagtcgaacgacctgatcgtcgcggtcaacggcaaggccagcgaagacctgaacaactacacccaagcctacgagcaagacctgcaacaagtgggtgttcagcgtgccgacgtagtgaccgtcgccagtgccgacaccacgccgcctgtggctgcggccaaaggcaaaaaagccgtgaaaccggcgaaaaaagccgcgctgcccaccgtgccgaaagaagcggtgaccaccgagaagagcatccagaccgtgcaggccaagcaagctgaaagcaagcaggttgccagcgccggtaaagcgcagatcgaaggcacgtgccgcgatccgaacctcgccgactgggcgccggtgccgtgccctaacgtttaagtaacatgctgctataagcgtcaaacgccagccgatcttccgctaatacgcaagatcggtggcgttctttttgcaaatcgttaaactgctgcggccactcaataattacaccgaggccgtgtgcatgaaatttcgtcttttgttgtgggtgctgggcctgatgatgggcaaagccagccgcaccaatcctgccttccagcaacagttgggtgacaaagacctggcgttccagttgcagaccctcgacggcaaggttgcccgtcacttcatcgtcaaagaccagcgcatcaccagccgctcgggtgttcacccggcgccggcgtttgccattgcgttcaaggatgccgcctacggcttcgccacgatgcaggcgaagaacaagcaactggcgttcatgacggggattcaggacaagtcgattcagatcaagggcaacccggcgctggtgatctggttccaggggctgaccaagtatttgaagccgaagaaaaagaagtaaggctttcagatagacccaggtggatttatcgcaggcaagccagctcccacatttgatggtgtttacacatcaaaatgtgggagctggcttgcctgcgatagcggtctgacagactacacattcagccctggctgaactgggacgccaactcgcgcaacaacacctcggcatccagcaccttgcccaccacttcctccgccttgtcccggctcaagcccagacgctcaagcagtgcatccggaatggcctcatccggcccggacccaatgccccggctgcgcagcaagcgcaccgccagacacaccaggttcgggtactcggcgtattggccgtcgtagctcgggtcgtgctggaagcgcagggcggtggacagttcgtccggcatgtcccagtagcgcatcagccaggcgccgatttgctcgcggctgatgcccagcaagtgttgctcaacgtagctgtggcacaggtgtgggttgacctccaggtgccggcagatcagcgagaagtgtggcgggaacacgtgggccagcagcagataaccgaagttgtgcagcaggccggccaggtaagtcaggccggcttccgggcgctgggcgcggggcatggcacgggtcaggccttcaatcacggcggcggtgtagatcgactgatgccagtacggcgtggactggtgcgggtggtctttgggcaagctcagggttttacccaatgccagacccagcgccaggttgatcaccagatcgaaacccagtacgcgcacgatggcgtcttccaccgaacggattttgcccggcgacgcgtagtacggcgacgcggcccagctcaccacttgggcggccagggccgggtcggtttcgacaacgccggtgatgtcatcgatggtggcgttggggtcgacgcgcagcttgatgatcttctgcgcggtgtcggccagcggcggaatctcgagggtcgcttccaggcgctgctggatgcggcgggcggtgaacgcctgcatggcctgggtgatttcctcgcggtcatcattcgggcggtcgaggttggggcggatgttgctcaacggctcgccgaagtgcccggcagtggctttggtgagcatggtcttgaagtcgccgctggcgatttccagcagcaagccggcttcacccgagtgcaccagcaagctcggttgatcgagcaggctgccttcgtacaggcaaggcgaggtggtgagcgccggcaggcccggcagcaggctcaggctgtgtttgcccagcatgcgctcgacgcgatccggcgacacggccgtgaggcggcgcccggtcagttcggcgaggcggttgaggtccagcagctggttctgggggaacagcaccatgagtgcgccaacggcatcttccagcagaacggcctggacctttcgcgcgggattcaggccaggttgctctgcaacctccgtgaacggaatagcgagctttgcgagcagagcccgaatgaccggcggggcggtcagtggggctgtggcgagggcaacttctgacatggcctgatccaaattcgtacagtcaccgaagtataaccagcttgatacaactgttggtcgactaagtgagtcaggcgtcacacttggccatattgctgcccatgccgcagccagcggtcgagcaacgggctgacgtgatccggccatcgctccaacaacgcttgcgcggcgtcacgcacggcaggcaacaggtcggcatcgcgcatcaggtcggcgaccttgaattgcaaaaggcccgtctggcgggtgccgagcatttcgccggggccgcgcagttcgaggtctttttcggcaatgacaaaaccgtcgttggtttcgcgcatgatgcccaggcgctggcggccgatctgcgacagcggcggatggtagagcagcacgcaatggctcgcggcgctgccccggccgacgcgcccgcgcaattggtgcagttgcgccaggcccaggcgctcggggttttcgatgatcatcaggctggcgttgggtacgtccacgccgacttcgatcaccgtggtggccaccagcagttgcagattgccggccttgaattcggccatgaccgccgctttttccgcaggcttcatgcgcccgtgaatcaagccgaccttgagctcgcccaaggcgctggtgaggtcttcaaaggtggtttcggcggcctggcaggtcagctcttcggattcttcaatcagcgtgcacacccagtaagcctgacgtccttcggcgcaggcgccgcgcacgcgctcgatcacttcgacgcggcgggtgtcggtgaccagcacggtgttgaccggggtacggccgggcggcagttcgtcgaggatcgaggtgtcgaggtcggcgtaggcgctcatggccagggtgcgcgggatgggggtggccgtcatgatcaactggtgcgggttcatgcgcccgcccacgcctttctggcgcagggccaggcgctgttgcacgccgaagcggtgctgttcgtcgatgatcaccagcgcgaggttcttgaactgcacttcgtcctggaacagcgcgtgggtgcccaccaccattggcgcgccgttggcgatttgctccagggcggcagcacgcaccttgcctttgagcttgccggccagccacgcgacttccaggcccagaggttcgagccagcgcttgaaggtgatgaaatgttgctcggcaagaatctcggtgggggccatcagcgcaacctggtaaccggcctctaacgcctgcaaggcggcgagggcggcgaccacggttttgcccgcgcccacgtcaccctggatcagccgcagcatgggttcgtgctggctgaggtcgtaagcgatttcattgcctacgcgctgctgggcaccagtcggcgcgaagccgaggttggccaggtattgtgcaggcaggcgtgtagctttcggcatcgcgggtgcgcgcaaggagcgcatgctttcgcgcaggcgctgctgggacagttggtgggtcagcagttcttcgaaggccaggcggtgctgggcccagtgatgacccagggccaactcgtcgacatcggcgtcagcgggcgggtgatgcaggtaacgaatcgcatcgtccagcgacgccagttggtagtcgcgcgccagttcgagcggcagccagtcgggcaggcttttcggaccgagcatcgtcagagtttgcatgcacagttggcgcaggcgctgttgggtcaggccttcggtgagcgggtagatgggcgtaagcgtggtgtcgaccggcggtggctcgtcgccggtgatggcgcggtattccgggtggtagatttccaggcccgatgctccggggcgcgcttcgccgtaacagcgcacgcgcgtgccacgcttgagaccttctttctgcgcattgctgaaatgatagaagcgcaggctcaggccaccggtgccgtcctgcaggcgcaccaccaggctgcggcgcttgcccatcaccacgtcggcgccgctgacggtgccttcgaccaccgcgtcctgcccggggcgcaactggccgatgggcaccactcgggtgcggtcctgatagcgcaggggcaggtgaaacagcacgtcctggagattttccaggccgaccttggccagtttctcggccatggcttcaccgacacccttgagtgccgtcaccgacacctgtgacagctcagtcatacgtctgcttagctcgcagcaggcggcttggccaccgaacacaggcggatcgagtcggcgaggatctcaatggctttcgggcgcgggaagctggcgcgccaggcaatcgccacggtgcggaacggcactggcggcgtcagtgggcgcacggcgatcacgccaggggcgtagtgatggctgtccacggccgacaacggcaggatcgaaatgcccaggccggaagcaaccatgtggcggatggtttccagggagctggattccacagtggtgtgcttggcgccgtcgttgcccttggtcaaggtcgggcaggcttccagcacctggtcgcggaagcagtggccttcgccgagcagcagcaggctcttgtcattgagcaggccggcgtcgatggtgtctttctgcgtccacgggtgcgaagccggcatcagtacgtagaacggttcgtcgtagagcggcaacgtcagcacgtctgcttcgttgaacggcagggcgatgatgattgcgtccagctcgccgttgcgcagtttgtcgcgcagcacgtgggtgaagttttcttcgatatacagcggcatctgcggtgcgacgcggtgcagttgcgggatcaaatgcggaaacaggtacgggccgacggtgtagatggcgccgactttcagcggtgccgtcagctggttcttgccggcctgggccagttcgcgaatgctttgcgcttgctccagtaccttctgggcctgggcaacgatgccttcgccgaccggagtcaggcgcacggcgctcttgctgcgctcgaaaatcagcacaccgagttcgtcttcaagctttttcacacccaccgacagcgtcggctggctgacatggcaacgctcggccgcgtggccgaagtgctgctcttgggcgagggtcacgatgtagcgtaattctgtaagagtcatagcgagcgtccatgaggttgcgggccaagcataccggctgcaatcgatagacgcacgttatcagagacagtggtacttacgacacccggtaatcgggtgtcgtgaagcatgactcaattttgtgggtacttgaacgtgaaggtttcggtgaacggaccccaccattcaggcacgccggtttctttgtcgatatggtggaagaagccgttgatctgcgggctctcataacgcagcactacggtgtaggtgccggggccgtccatcttcacgttgttggcgtaatgggcgccgtctttggcgaccatgggcaacagcgtgccgatttccttgtagttcggcgagccctgcttgaccagcgagtagctgatgctcaggtacggtatccactcaccgttggcgaacccgtattggttatcggcggtggcgtgcacgtcggtttccaggtgcaccgaatctttgtccatcaccatgcctggcggcatcggcgccatctcgatgccggtcaggtaggacgaggcgatctccatgtcgtgggcctgcacgggcccgccaatcggatactcgcgcgcttggctgtaagcggaaaacgccagcgtggtggcgagtgccagtgctgcggcgacgggtttgcacaggtgcttcatgggtgatgctccagggtgggtggtcaggattgagaggggcgcgagtgaatcaggcggctgccgaccacaaggacggcgagggtgagcagccaggcaaacagctgaacgcccaaggggcggtcggtgtagccggtcatggcttgcagggcgcggccgccgaggctggcgtcggagaccagccatgaggtgtcccagagctgatagccccaggcgggaatcaggttgatgcccgccagaatggccgcggcgcgaccggccatgccggcggcgagcacggcgatcatccagctggtcaccgagaacagacgcttgaggctgatgaccagcaggccgcgatacagcaaccacgacaatgcgccgccagccgcaatgccgagcaggccgccgatcagcatggtcagtggttcggtgtgggtggaggcggcgatgccgtagagaaacaacacaatctccgagccttcacgcagtaccgcgacggtaatgaccacggcgagggccagcagggatttttcgcctttttgcacggccagaccggtgctgcgcagctcgttcgccagctcgcggccatggctggccatccacaggttgtgccagcccagcatgaacacggcgacgatcagaatggccgcgttgaaaatttcctggccgaagccatccagcgcttgggtgatggcgccggtgaacaacgccaggatgccggccccgcaaacgcccgcgacgatccccccagcgatgaaccgcccgcgccgggccaggccctgggtagcggccatgacaataccgatcacgatcccggcttccagcacttctcgaaacacaatcaacaggcaggcgagcatggcttactccttggccggggcggcagtgacggtgcctttggcctggtccgggtggtagtcgtcgaaaaagctgtaggtgccagggtgcattggcccggcgaacacggtgatggtgttgccgggcacgacgattttttcgaacttcatgtcgtagctttcgaactcgtcgacgctgtcatcgttattggtgagctggatgcgaaagcgttcgccggccggaaccgtgaaggtcgagggtgaaaaggtatggttctggacggtcagggtgatgacctgatcggcatgggctgcgcaagacgcgccagcgagcgcgagcagtagggcgggggtgcgcagaatgcagggcatcgcgaaaacctctcaaatgagaactgttcgcgcatgcttggctttgtattggaatgttacaagtgaagacacatgacatcggtcatgcattcagctgcggttcagcagtaagcgggcggggtgcccaagaagggaaatgggcacccgcaggtgcccattgggagtggctcagcggcggcgcttttcaatgttgtaaacgaacggcgcgacaatttcgacgcttccgcctttcaacatatccgccggtggcttgggcagtggctgggcacgacgaatcatgtccagggtcgcgcggtccaggtcggcgttgccggagcggcccaccaattcataggacagcacgttgccttctgcatcgaccacgaaacgcaggcggttcaagccttccttgccacgttgttgcgcgcccggcgggtacttcttgtacttttgcaggtgcgccagcagggtgccttcccaggaagctttagccgcgacctgttgaggcgacgggcctggcgttggctgggccgatttttcagtcggtgcgttgttctgcgggctttcgctcggcggctcttcggaaggtttttccttgggcggctcgggcttcttctccacaggctttggaggctgaggtttgggcttgggcttgaccggcttgggcacctggatcgttggcttgggtgcctcggccagtttcggcaggggcagctcttccaccggtgcaggcggctgcggcggcgtgatcaccttgggcggagccggtggcggcggtgcgggcatcggcgccaggtcgatgaccatggccgccggtggcagcgtcaccggatgcggcgcggaccattggagcgcgatgatgatcgcgacggcatgcacgcccagcacgacggcgaggctggtgccataccgcgtcagtttgtggcgcgtcgtgatcatttcttggctgccgtctcaagtccgaccaggcccaccttgaggtagccggctgcccgcagggcatccatcacgctcatcaggtcgccgtagtccacgcccttgtcggcctggaagaagatcgtcgtgtctttcttgccctgggttttggcgtcgagcaccgggcccaaggtttcagctttgacttcttcttcgcccaggtacaggcgttggtccgccttgacgctgaggaaaatcggtttctccggccgcggcgcaggcttggcgctggaagcgggcaggtcaaccttgatgtccacggtggccagcggtgcggccaccatgaagatgatcagcagcaccagcatcacgtcgataaacggcgtgacgttgatttcgtggttctcgacgagttcgtcgtcgccttgattcaaatgcaggcccatggccgattaccccactttcaccatgtgcggttgcgagctgcgctcggtaggcaggtgatcgaggtcgcggctgaccagcagcaggacttctgccgacgcgtccgacacctgggctttgtagccggcaatcgaacgggcgaagacgttgtagatcaccaccgcaggaatggccgcaaccaggcccagcgctgttgccagcagggcttcggcgatgccgggggcaacgacggcgaggttggtggtctgggttttggcgatgccgatgaagctgttcatgatgccccatacggtaccgaacaggcccacgaatggcgccgtggaaccgatggttgccagcacgccggtgccgctgctcatgttgcggccacaggctgcaaccaggcgctccaggcggaagctgacgcgctccttgatgccttccttctcgcgggtgttggccgacaggcgcatttcttccagcgcgtcgtgtaccagcaggttggccagcgtgcccttcttggttgcggtgtcgctggcttccttgagggtggtggcttttttcaggtggacgatttcagtgcgcaggcgacgcttggcgccgagcagctcgaagcccttggcgatccagatggtccaggtaatgatcgaggcgatggccaggccgatcatcacggctttcaccacgacgtcagcattctggtacatgccccatggcgacaggtcgtgagccatgcccagtgagttgtcttcttccagtacaacaccgccatcatcggcaggcgcgggagccgcagcctggaccgggtcggtggccgcaggtgccgcagcaggtgcggccggggttgctgcattgtgttcggcagcggccggagcggcgggtgcggtggcatcagcgaatgcggcggtcggcgccagcagtacgctgaacagcatcgcagccagcgcacgccaggcgcgggatgggctgtgaggcttggttggcgaagcggggtttgtattacgtgtcatgctggccggacctgagagaaaaaatgagtgatcgtcctgccagacccaagagggtcgaggacaaatgggtggtcattattgcaagtaattcttgttaacagaagtaatacagttactttatttgtccttttgctggccgctggtcatctccgacggctaatctgcgtctttaagaatggagttttcggatgtctgcgccttctgttgtgattgccggctgcggcgatgtgggtagtcggctggctagccaattgctggcctcggaatgggaggttcacggcctgcgccgtgatatttcgaagcttcccgagggtgtgatcggcattgccggcgacctgttcaagaaagactgccccgacacttggccgatcggcggggtggattacctggtgtattgcgcggctgcgaccgaccatgacgaggcgggttaccgcgctgcttacgtgcaaggtttgcagcatgtattggagtggctgggcgactatggccaggagcccaagcacctgttgtttgtgtccagcagcagtgtgtatgggcagcagaatggtgagtgggtcgacgaaatgtctgacacccaggcgcagggctattccggcaaagtcatgctggaagccgagcaagtggcgctcaacagcggtatcccagcgagcatcgtgcgcttgaccggcatttacggcccgggccgtgagtggctgttgacccaggtgcgccaaggctatcgcgtggcaatcgacccacctttatatggcaaccggattcacgcggatgacgcagcgggcctgctggcgtttttgttgcggcatgtggagcagggctgcgcgttggacaaggtctacatcggcgtggacgatgcgccggcgccgttggcggaggtagtgggctggctgcgggagtatctgggtgtgacgcagtgggctgacgacgccagtgtgcgccgggccgggagcaagcaatgcagcaatgcgcgggctaaagcgctgggctgggtgcccacgtatccgagttaccgcgaaggctacgcggcgattctcaaaggctgaaactcagttaaacatgtgggagctggcttgcctgcgatagcggtgtgtcagtcacacctgaatgggatgtgacaccgtcatcgcaggcaagccagctcccacattcagatccatgtaatgccgtgtttactgtttttccagcagccactgccgtgggccgggcgtaaacgaaggtacttcatccgcctgcgccgtattcaccgcctggaaaatttccagttgcttgcccttgcgcgcaaagatccacgggttgccctggccgttcagctgcagccagatgctgtcatagccgccactcatggaggcgcaatcgccagccaggcatagcgaatattgatcaaccccaggcaggccggcgactttgccgttggcctggaattgaacggtggcaccgtcaccattgccgtccttgatcttccagtcaccgcccagataggccgcatacagcgcacgctcgaagttggcgcccaatggcgcgccttccggagccgggtctttggcgcgggcgaacagttgttcgggctcgttgtcgttggcaacttgcagcaattgtttgcctttgcgcttgagttcggtagcggagctgccgtagaactcgacgctccaggcgccggatttctcaccgagcaatttgccttcagctacttcaaaaccgttgtagtagcgggcctgcgaagccttggggttgacctcccactctaggttcgggccaaaagcttgcagggcttcacgcaaagggccgcccttggctgccgcgttgatggcggcctggttgatccaggtgccgcttacatccaggtcggcggggttgctggcacagccgccgagcaacagggcgagcaacgaagaagctagaagcgctttgcgcattacgaaatccttctgaaacgaagtcggcgcaacctgaaaaggctgcgccggatgtttttactcgatgaccagaatcgcgtccatctcaacctgcgagccctttggcagggcggcaacgccaatggcggcacgggctgggtacggctgttcgaagtacttgcccatgatctcattgaccttggcgaagtggctcaggtcggtgaggaagatgttcagtttgacgatgtccttgaacgaaccgccggccgcttcggccaccgacttgaggttttcgaagacctgtacggtctgtgcttcgaaaccttcaaccagttccatggtttttgggtccagtggaatctggccggacatgtaaacggtgttgcccgccttgatcgcctgggagtaagtaccgatggcggccggggctttgtcgctggtgataacggtcttggtcatgtgtgactccttgtaagaggtttattaggcacgcatacgggtgatgcggatgaccccggtcaaggcgcgcagtttcttgatcacgcgggccaggtgcacgcggtcgtgtacgctgaccaccagttggaccacgctgatgcgaccatcgcgctcgtccatgctgattttttcaatattgccgtcggcggcgttgacgctgctggccagcagggcgatcaggccgcgctggtgttcaagctcgacgcgcaactcgacgttgaactcgccggtgacatccttggcccacgagagctggatgcatttttccgggttgtggcggatttcggtgatgttgcggcagttgtccaggtgcacgaccatgcctttgcctgccgacagatggccgacaatcgggtcgcccgggattggcgtgcagcacttggcgtagctgagcaccagaccctcggtgccgcgaatggccagcgggccttcggggcttggcaactgctcgccttcgccgagcaggcggcgggcgaccacataggccatacggttgcccaggccgatgtcttcgagcaaatcttcgatggtttcctggcgatactcgtgaagcatcgcttgcacacgctcctgcgggatcttgtccagggcactgtcgaaaccgttgagcaccttgttcagcaggcgttcgcccaggctgatggattcggagcggcgctgcagcttgagggcgtggcgaatgtgtgtgcgcgccttgccggtgaccacaaaattgagccaggccgggttcgggcgcgcgcccggtgcgctgacgatttcgaccgtggagccgctttgcagcggttcggacagcggcgcgaggcgacgattgatccggcaggcaatgcagctgttgcccacgtcggtgtgcacggcgtaggcgaagtcgaccgccgtggagcctttgggcagctccatgatgcggcctttgggcgtgaacacgtagacctcgtccgggaacaggtcgatcttcacgctttcgataaattccagggagttgccggcacgttgctgcatttccagcacgcccttgacccactgacgggcgcgggcgtgggtgcctttgggctgctcgtcgccgctggatttgtacagccaatgggcggcgatgccgttgttggccatctcttccatttcacgggtgcgaatctggatttcgatcggcacgccatgcatgccaaatagcgtggtatgcagtgactggtagccgttggccttgggaatcgcgatgtaatccttgaagcggcccggcaggggtttgtacaaattatgtacagcacccagtacccggtagcaggtgtcgaccttgtcgacgatgatcctgaacgcgtacacgtccatgatttcgttgaaggcccggcgtttgccgcgcatctttttatagatgccgtagatatgcttttgtcggccgctgacttcgccttcaatctcgtcgatcgccaggcaatggctcagcgactcttcgatcttgttgacgatttccttgcggttgccccgggcgcgcttgaccgcctggtagatgcgcgccgagcgcatcgggtgcatggccttgaagccgaggtcttcgaattcgatacgaatggcgtgcatgcccagccggttggcgatgggcgcgtagatttccagggtttccttggcgatgcgccggcgtttttcgccggacagcacttccagcgtgcgcatgttgtgcagccggtcggccagcttgaccaggatcacccgaatatcgcgggccatggccatggccatcttctggaagttttccgcttgggcttcggccttggtctcgaagttcatctgggtcagtttgctgaccccgtcgaccagttcggccacggtttcgccaaattgtgcgctgagcgcttccttggcgatgccggtgtcttcgatcacgtcatgcagcatcgcggccatcaggctctgatggtccatgtgcatgtcggcaagaatgtttgccaccgcaaggggatgggtgacatacgcctcgccactgcggcggcgttggccgtcgtgggcttgttcggcgtagaaatacgctcggcggaccaggttgacctggtctgggccgaggtaggccgataagcgatcggcgagggcgtctatgctcggcaaagtgtgaactcctgccgttggctgtgaccccgcgccgtgctacgtcgaccaggcataggcttagacggcctcgttggactcgtcctcgaacgctgcaaacagcggttcgtcttcaacgatctcggcgttggcgatgaactcgtagctcatcaggccttcagcgatttcacgcagggcaactacggtaggcttgtcgttttcccactggaccagaggctctttgccgccagtggccagttgacgggcacgcttggtagagagcatgaccagctcaaagcggttatccacgtgttctaggcagtcttcaacggttacgcgggccatggtattcctcggagcgaatgcaagatgcgcgctgcccggttgggcgagcggactgagcagtttaaaaaatcaccagcgtttagggaagcgctgatttttcgcaagccttcgtaaaaccgctgcaagtgccaatgtaaagcccttgcagctgttttgggaagcgccaatcagccgagcaattcagcgagcaatttgccgaaacgctgctgttgacgcttttgctggagctgattggtgcggaaaatcgccttcaaatcatccagcgcgtgggcaaaatcgtcgttgatgatcaggtagtcgtagtcaacgtagtggctcatttcgctgacggcctcacgcatgcggccttcgatgatctcgtcactgtcctggccacggttggtcaggcgctggtgcaaggcttgcagcgacggcggcaggatgaagatcgaacgcgcctttggcatcaactggcgcacttgctcggcgccctgccagtcgatttccaggatcaggtcgtggccttcgtccaacgtctgctgcagatggctctgcgaggtgccgtaaaggttgccgaacacttcggcgcgctccaggaagtcaccgtgctcgatcatcctgacaaactcggtgcgctccacgaagtgatagtgcacgccgttcacctcgcccgggcgcatggcgcgggtggtgtgggagaccgagatacggatctgctcgtcagcgtcggtcaaggccttgaccaggctgctcttgcccgcgcctgaaggcgcggaaatgatgtaaagggtgccggtgctgtgggtcatggaggttgccttactcaatattctgtacttgttcgcgcatctgctcgatcaacactttgaggttgaccgcggcctgggtgctgcgcgggtcaaacgccttggagcccagtgtattggcttcgcggttgagttcctgcatcaggaagtccaggcgccgaccggcggcaccggcggacttgagcacccggcgcacttcaagaatgtgggtgctcaggcggtcgagctcttcggccacgtcgcttttctgggcgagcaggaccatttcctgctccaggcgcgtcgggtcgaggtcggccttcatgtcggtgaagcggtcgaggaccttctggcgctgggtggcgagcatctgcggcaccagttcgcgcagggtgaccacgtcctcttcaatcgaggtcaagcgctcgctgatcaggcgggccagctcggcgccttcacgttcgcggccggccttgagctccttcaaaccctgattgaacagggcaagggcttcggcgttgagggcttgcgggtcagtggcgtcggcgaccagtacgccgggccaggccagcacttccaacgggttcagtgcggcgggctgcttgatcaggcctgcgatggtttcggcggcggcgaccagttgcgcggcgcggtcacggtcaacctgcagcggtttgccggtggtttcttcggtgaagcgcagggtgcattccagcttgccccgggaaataccctggcgcagcgcttcacgcacggcgccttcgagatcacgaaacgattccggcaggcgcaagtgcggctccaggtagcggctgttgaccgagcgcagctcccagctcagggtgccctggacgccggctttttcgacgcgggcgaaggcggtcatgctgtgcaccatggaagtacctcgcgatgcagtcccgcaaatacgggtgggtggttaaattgaagccgacaggctgcgaaggcgcaggagtgtagcgcagtggggcgggcgcgcccaaacaatgggcgatggacagacctttcgtaaccgaatttttagaagtgccccgaaacggttcgcggctctataatgtcggcagtttttcgtcctccgtacaggtaccccctatgaaacgtccaagtggtcgcgctgccgatcagctccgctcgatccgcatcacccgcaactacaccaaacacgccgagggatctgtactggtcgagtttggcgataccaaggtgatctgcaccgtcagcgtcgaaaacggcgtaccgcgcttcctcaaaggccagggccagggctggttgaccgccgaatacggcatgctgccgcgcgctaccggcgagcgtaaccagcgtgaagccagccgtggcaagcaaggcggccgcaccctggaaatccagcgtttgatcggtcgttccctgcgcgcggccctggacatgtccaagctgggcgacgtgacgttgtacgtcgactgcgacgtgatccaggccgacggcggcacccgcaccgcgtccatcaccggcgccatggtggccctggttgacgcactgaaagtgatcaagaagcgcggcggcctgaaaggcggcgacccgctcaagcaaatgattgctgccgtatcggtgggcatgtaccagggcgagcctgtactggacctggactacctggaagactcggccgccgagaccgacctgaacgtggtgatgaccagcaccggtggtttcattgaagtacagggcaccgccgaaggcgcgccgttccagcctgctgacctgaatgccatgctcgcactggctcagaaaggcatgaccgaaatcttcgaattgcaaaacgctgcgctcgctgactgagccggtcgacctcaaggagaaacgccatgaatgacagtcaactgccggaacccacgctttcctacgaagtgcgtcaaagtgcaatgttgtgtcatctcgcggcgtttctggggtttgtgttcccctttggcagtgtcgtggggccgctgatcctgtggcagatgaagaaggaagtcagcccgttcatcgatgatcagggcaaggaagcgctgaatttccagatcaccgtggccatcgcctggatcgtgtgcatcgtgctggccttcgcggtcatcggtttttttctgatgacggccctggccatcggcagtgtggtgctgacgatcatcggttcgatcaaagccaacaagggtatcgcttatcggtatcccttgacctggcgattggtcaaataatgaacacccacaaaaaaaccgacagcgatgtcggtttttttgtgcctggaaaaagacctcagatggtcagtgtccagtcgtagtccacgatcagcggcgcgtgctgcgagaagcgtggctggcgcggcaagcgtgcgctgcgaacgaaccggcgcagacccggggtcagcaactggtagtcgaaacgccaacccaggttaagcatctcggcctgttcgttatccggccaccagctgtactggtcgccttcacggctgacttcacgcagggcatctacatagcccatgttgccgacaatctcgtccatccaggcacgttccggtgccaggaagcccggggattgctggctgtcacgccagttcttgatatccagcttctgttgcgccacgtacagcgagccacagtaaatgtactcgcgacgtttacgccgctgcttatccaggtaacgggcgaaatcgtccattagcttgaacttctggttcaagtcttcatcgccgttctgccccgaagggagcagcaaggtcgcgatgctgaccttgtcgaaatcggcttgcaggtagcgcccgtagcggtcggctgtctcgaagccgaggccgctgatgaccgccttgggttgcaaccgcgaatacaaagccacgccaccttgggtgggcacttcggcatcgcaggcataaaggaagtagccatccagttggaaggctgggtcgtccagttcaaaggcggaggcgcgggtgtcctgcaggcagatgacgtcggcattctgtgcttgcagccaactgagcaaaccacgctcgactgcagcctgaataccattgacgttcacactgatgatccgcataaatggccccaaaaatcgcgtgcgtgtatgatacacgccgtctacctaattagctaaatccgtggtatctgaggcttttttcatgcaggcgtatcaacgcgatttcattcgttttgccatcgatcgcggcgttttgcgcttcggtgagttcactttgaagtccgggcgcaccagcccgtacttcttcaatgcgggcctgttcaactcgggttcggccctggctcagctgggtcgtttctatgcagcggccatcgttgaaagcggtatttccttcgacgtactgttcggcccagcctacaagggaattcccctggcggcagcgactgccgtggcgctggctgaacatcacgggcaggatctgccatggtgcttcaaccgcaaagaagccaaggcgcatggcgaaggcggcagcctggtcggggctccgctcaaaggcgacgtgctgatcattgacgacgtgatcaccgctggcactgccatccgtgaagtgatgcagatcatcgcttcccaggacggcgccaaggctgccggcgtgctgatcgcgttgaaccgccaggagcgcggcaacggtgagttgtcggcgatccaggaagtggagcgcgatttcggtattccggtggtgagcattgtgtcgttgaaccaggtgttgcagttcctggaagatgatccgcagctcaagcagcatctgcctgctgttcgcgcataccgcgagcaatttggcgtctgacgcagtaagtcctgtggggtgggcttgtgtgggagcgggcttgctcgcgaatacggtgtttcagaaacatatccggtgactgacactccgctttcgcgggcaagcccgctcccacaggggatctccactgtactgcagaatcaggtcgcaaataaaaaagcccccgctcaattcaattgagcgggggctttttggttttcagcgatcaggaacgcttgcggttactgatcagcgtgcccatgccggtatcggtaaagatctccagcagcaccgcattcggtacgcggccatcgatgatcagcgagctacccacgccgccctgcaccgcttccagtgcacaacggatcttcggcaacatgccgccgtaaatggtgccgtcggcgatcaactcgtccacttgctgggtggtcaggccagtcaacaccttgccttccttgtccatcaggccggcgatattggtcagcagcatcagcttttcagccttcagcgcttcagcgactttaccggccaccaggtcggcgttgatgttgtaggactcaccattggcgcccacgccgattggcgcgattaccgggatgaaatcacctttgaccagcaggttcagcaggtcggtattgatcccgatcacttcacctacctggccgatgtcaatgatttccggctgagtcatctccggcgtctgacgggttacggtcagctttttcgcacggatcaactccgcgtccttgcccgtcaggccaatggcgctgccgccatgacggttgatcaggttgacgatgtccttgttgacctggccgccgaggaccatctccaccacgtccatggtttgcgcgtcagtgacgcgcatgccatcgatgaagtggctctcgatcgacaagcgcttgagcagatcgccgatttgcgggccgccaccgtgcactaccaccgggttgatccccacggctttcatcaacacgatgtcgcgggcaaagccggttttcagctcgtcgctttccatggcattgccgccgtacttgatcaccagcgtcttgccgacgtagcgtcggatgtaaggcaacgcttcggaaaggaccttggcagtgttggcagcggcttcgcgttcgagggtcattcagggctccggtaaaaatcagaacggtaattggagatcaggggcaacacgtttcaactgggcgtggaacacgtccttgatgcgctgcaactcagcctcggtatccgcctcgaaacgcaggaccagcaccggtgtggtgttggacgcgcgaaccaggccccagcctttggcgtaatcgactcgcacaccatcaatggaggtcaggttggcgccttcaccccattgcgcatcgtgcagtgcgtcaatgatgctgaatttgctctcttcggtcacatggatattgatctctggcgtagaaatatcattcgggaacgtctgaaacagctcctgcgcagtcgatttttccttgctgaggatctccagcagacgggcggcgctgtaaatgccgtcgtcaaagccgaaccagcgttccttgaagaacacgtggccgctcatttcgccggccaacagtgcgccggtttccttcattttctttttgatcaacgagtggccggtcttccacattagcgggcggccgccgtattccttgatcaggggtgtgaggcggcgagtgcacttcacgtcgaagatgatttcggcgttggggttgcgtgccactacgtcacgggcaaacagcatcagcaagcggtcggcaaacacgttttcgccggtgtctgtcaccacgccgacgcggtcgccatcgccatcgaaggccaggccgacgtccgccccggtttccttgaccttggcgatcaggtccaccaggttttcaggcttgcccgggtcggggtggtggttggggaagttgccgtcgacgtcgcagaacaacgggatcacttcgcagttcagcgcttcgagcaattgcggggcgatcacgccggccgcgccgttgccacaatccaccactactttcaggcggcgagcgagtttgacgtcgccggtgatttgatccgagtagcgctgcagaatgtcgaccttggtgatgctgccttcaccgctggtcaggtcgttggtcttcaggcgcgtgtgcagggcctggatctgttcgttggccaaggtatcgccggcgatgacgatcttgaagccgttgtagtcggacgggttgtggctgcctgtaagcatcaccccggatttgccctcgagcacgttggcggcgtagtacagcgcaggcgttggcaccaggccaacatcactgacatggcagccgctgtcggccaggccctggatcagttgttccaccaactcggggccggacaagcggccgtcacggcctaccgacacgttgggctcgccttgggccaggctctgggcgccgatggcccggccaatccagtaggcggtttcggcggtcagggtcttgggcaccacgccgcgtatgtcgtaggcgcggaagatgctgtcgggaaatgtcggggcgactcgggctgcggtactcatcgcggggggaaactccatctgaaaggggtaaagctggcctgaatgtggcgaccggcgggctcaaactgaaaggtatgacggcgctttcggcagagagttcgtggtgcaaaaaggccatcggcgtgctggctttgtcttctgtttcgagtaaggcattgatttaaaaggggaattatcgctgatcaagtccgcgtattcttcatcctgaaaagccatgcggtagcgtctggccggacaggggcgcccggccagcttcagcttagtcagtggctgccggaatggccaaaaccgcctgcgccgcgttgtgtttcaacaaattcctcaaccagctcgaagtgcgcctgcaccaccggtaccagcaccaactgggcaatgcgctcgccgatggcgatgttgaacgcagtctgcccacggttccagcacgacaccatcagttcgccctggtaatcggagtcgatcaggcccacgaggttgcccagcacgatgccgtgtttgtggcccaggccggagcgcggcaggatcagcgccgccaggcccgggtcgcccacgtagatcgacaggccggtcggaatcagaatggtctgacccggctcaaggacggtgtcttgcttgagcatggcgcgcaggtccaggccggcggagcccggagtggcgtaggccggcagcgggaattcggtgccgatgcgggggtcgaggatcttggcttgcaaagcgtgcatggaaattaaacctggttcagccgttgggcgataaaagagatcagttggcgggcaatcttgcccttgctggtctgggcgaaaagggtggcgtgcaggtcgcggtcgatcacgctgcaggcgttttcctcgctgttgaagccgatgctcgggttggcgacatcattggcaacgatcaagtcgaggtttttgtctttcaatttgcgagcagcgtagtcgagcaaatgctcggtttcggcagcaaagccgacactgaacgggcggtccggacgggtggcgatggtcgccagaatgtccgggttgcgcaccatttgcaggagcaggccgtcgccgctcgtagggtctttcttcagtttttgcggggcgacgacttccgggcggtaatccgcaaccgctgccgaagcgataaacaggtcgcagggaatggctgcctcacacgccgccagcatgtcgcgggcgctgactacgtcgatccgggtgacgcgatcaggggtcggcaagtgcaccggcccggtgatcagagtgacacgtgcgcctgcctcgaccgccgcttccgccaaggcaaagcccatttttcctgagctatggttggtgatgtagcgcaccgggtcgatgttttcctgggttgggccggcggtaatcagcacgtgtttgccggtcagggcgaggtgctggaagcaatcagcggcgcattgtgcgagatcggtggcttcgagcatgcggcccataccgacgtcgccgcaggcctggctgccggacgccgggccgaacaccttgaggccacggctttgcaggagttgggtgttggcctgggtggccgggtcgcgccacatggcctggttcatggccggggcgatggcgacggtggcgtcggtggccagtaccagggtggtcagcaggtcatcggcaatgccttgggcgaggcgggcgatcaggtcggcggtggccggggcgatcagtaccaggtcggcccatttggccagctcgatatggcccatggcggcttcggccgccgggtccagcaggtccaggtgaaccgggtggccggacaaggcctgcatggtcagtggtgtgatgaattcactgccgccacgggtcatgaccacgcgcacttcggcgccctggtccaggagcctgcgaaccagctctgcgctcttgtaggcggcaatgccgccgccgacgccgagaacgatgcgtttccgatacagacgctgcattggtttgcctttccagttcagtgatgccagttcagtgacgcctgcgacgccccctccccaggggaaatcgcacgcaaaaaagagggcttacgataacacagcgaccgcaaggcaacagcggcgtacgtgcgcatggaggtgggatgagtattcgcgattggcctgtggcggagcggccacgggagaagcttttggaatggggcgcggcgagcctgtctgacgccgagctgttggcgatcttccttcgcactggggtggccggtcgcagcgcggtcgacctggcgcgccatctgttggcgcaattcggtggccttcgcccgctgctggaggccagccagacgctattcagtcagcatttgggcttgggcccggcgaagtttgcgcagttgcaggccgtgctggaaatgtcgcggcgccatatggctgaacgtttgcgtgcggactctgtactggaaagcccgctggccgtgcgcgagtacctcaaggcgctgctgcgccatgagcctcacgagatctttggctgtctgtttcttgattcaaagcatcgagtcctcggctttgaggctttgtttcagggcaccgtcgacacggccatcgtttatcctcggcaagtggtcaagcgtgccctcgcttacaacgcggcggcattgatcctgtgtcacaaccacccttccggaagcgttgagccgagtgcggctgatcgaaagttaaccaaaatactgcaaaaggctttggagtcggtggatgtgcgggtgctggatcacatcatcgtgggtgatggcgacccgctgtcgatggcggaatacgggtggatataaccccgcccggcaagggcggggttaaggctcagggcttgacgctgactttcgagaaatcctggcgcccgaacgggctgacctgatacccctcgacgttcttgcgtgccagggcaaaggcggtcgggtgtgccagcggcaaccacagagcctgttgctggatttgtgcctgagcctgctgatacagcttgctgcgcacgccttgctcgctggtggtcttgccggcgctgatcagcttgtccagggccgggtcgcagtagcgggcgaagttagtaccggacttgacggctgcgcaggagaactgcggcgtcaggaaattatccgggtcgccgttgtcaccggcccagcccatgaacagcaggtcatgctcaccggccttggcgcggcggatcagctcgccccactcgatcacgcggatctcggcctggatgcctaccttggccaggtcggcctgcaacagttgcgcaccgaggttcgggttggggttcagcaagctacccgtcgggcgggtccagatcgtggttttgaagccgtccttgagcccggcgcggtccagcagggttttggccttggcgaggtcctgtggataacccggcaagtccttggcgtaactccaggtattgggcgggtaaaccccgttggcggcttcggcggtgccttcaaacacggccttgaggtagctggctttatcgaacgcgaggttgatagcctggcgcacttccggcttgtccagcggcggatgttggctgttgatggcgacaaacgcggtcatgaaggcggcagttttttcgaccttgagcgctgggtctttttcggcttcgccaacatccaggggcttgggcgacagagcgatctggcattcatcacggtgcagtttctgcaggcgcacattggcgtccggggttatggcgaagatcaggttatccaccgccggtttgccggcgaagtaatccggattggccttgtagcgcaccacggcatctttctggaaccgcacgaaaacgaagggcccggtgccgattggctggctgttgagtttctccggggtgccggccttgagcagtttgtcggcatattcggccgggtagatcgaggcgaagcccatgctcagggcggcgaggaaggttgagtcggcgtggtccagggtgaagcgcacggtcagcgggtcgagggcgtctatcttcttgaccagagtcggcaattgcagggactgcgcgtgtgggaagccgctctgggcgatcttgtgccaagggttcgccgggtcgagcatgcgctcgaagctgaagcgcacgtcttcggcggtcagggtgcggctcggggtgaagtattcggtgtggtggaatttcacgtccgggtgcagtttgaaggtgtaggtcaggccgtccggcgagacttcccaactgtccgccaggctgggcaccagcttgccactgttggcgtcgtaatccaccaggcggttcatcagcacgtcggccgaggcgttggtggtggtcagcgagttgtattgcaccacatcaaacccttcagggctggcctcggtgcagacgctcaagttggtggcggcaaaggccgccggagcgaaaaatagaggggcaagcaagagcggtagggcagcgaggcgcatattcggtttcctttgcagatcgaaggcccatctgcgagtgcagtctggaaaagtcctaccgtagtggtctgattgataaatgactagcccatttttgcctgtgcttttgccgaaaatgctgttttgatggcgcctcggcgcgtttcgtcgcgcactttccagtgcgggcgggcgctgtaaatcattctgtgcgacgagtggtcggctgtagcagcggcccctgacagcaacggttcaggcgtctgacaccaggatttacttcggtaaaaactcacgggttgttgttgcaccggggtctttctggtataaagcagcgctcttttctaggggcccggttccttcgcttgtaggtgtagccggtaagaccctaaagaaacgcggcgcctggcgccaaatgactgagagattaagcggccaacccatgccgggttgggcatgtggttttagagggctgaggcatgtcgagagtatgtcaagttaccggtaagggtccggtgactgggaataacatttcccacgcaaataacaaaacccgtcgtcgtttcctgccaaacctgcagcatcaccgcttctgggttgaagaagagaaacgttttgttcgtctgcgcgtatctgccaaaggcatgcgcattatcgacaagcgtggcattactgtcgtgctggccgaaatccgtgccgctggcaagatctaaggagctctatcatgcgtgaattgattcgaatgatctctagcgccggtactggtcacttctacactaccgacaagaacaagcgtactaccccggacaagctcgaaaagaaaatgttcgacccgcgcgttcgtaagcacgtgatctacaaagaaggcaaaatcaagtaattgattttcctccttgtgaaaaaaagcccgtctctcacgagtcgggcttttttttgcctgtgatttgctgatcaggctttctgctcgaacaccacgtagatcttgcggcacgcctccagcacttcccaggtgccgctgaaacccgccggaatcacaaagcggtcgccggcgcgcaaggtcttggcgttgccatcggcatcacgcagaacggacaccccctgcacaatctcgcagtactcatgttcggtatagctgaccttccattgcccgacttcaccttcccacacgccggcgctcatctgaccgcacgggctgttgtagtggttgtaaagggtttgctcgggatcgcccttgaggattttttcggcagcggggcggtagcggtctggggcggtgttggcttggctgaagtcgacgatgtcctggatgctcatgtgcgtgtcccgtctggcctgcggttggagagcccaaagtctatgtttattaaaatgaacatcgcaagggcgtttaccgctgttatgtcaaatatattgaaacacccccagcggctggtttagggtggcagctgccttgagccgaacagcaggctggccgggcaagaattctttgaggctgccgggggacatcacctggccctcgtattcaataagaggaggacactcgcatgaccaccctgacccgtgccgattgggagcaacgcgccaaggatctgaagatcgaaggccgcgcttacatcaatggcgaatacaccgccgcagcttccggcgacactttcgaatgcatcagcccggtcgacgggcgcttgctggccacggttgccagctgtgacgtcgccgacgcccagcgcgctgtggaaaatgcccgcgccactttcaattccggtgtctggtcgcgcctggcgccggccaaacgcaagtccgccatgctccgtttcgccgcgctgctcaacgccaatgccgaagagctggcactgctcgaaaccttggacatgggcaagcccatcaccgactccctggaaattgacgtgcctggcgccgccaatgccctgagctggagcggcgaggccatcgacaagatctacgacgaagtggccgccaccccgcacaaccagttgggtctggtgacccgtgagccagtcggcgtagtcggcgcgatcgtgccgtggaacttcccgctgatgatggcctgctggaaactggggccggcgctgtctaccggtaactcggtgatcctcaaaccgtctgaaaaatccccgctgaccgccatccgtatcgctgcgctggccgttgaagccggcattccaaaaggcgtgctgaacgtgctgccgggctatggccacaccgtgggcaacgcgctggcggtgcacatggatgtcgacaccctggtgttcaccggctctaccaaaatcgccaagcaactgttgatccgctccggcgagtcgaacatgaagcgcgtgtggctggaagcgggcggcaagagcccgaacatcgtgttcgccgatgccccggacctgcaggccgcggctgaatccgctgcgggtgccatcgcctttaaccagggcgaagtctgcaccgccggttcgcgcctgctggtcgagcgttcgatcaaagacacattcctgccactggtgattgaggccctcaaaggctggaagccgggcaatcctctggacccggcgaccaatgttggcgcactggtggacacccagcagatgaacactgtgctgtcgtacatcgaagccggtcacgccgatggcgccaagttggtagcgggcggcaagcgtacgctggaagaaactggcggcacttatgtggaaccgacgattttcgacggcgtgaccaatgccatgaagatcgcccaggaagaaatctttggcccggtactgtcggtgatcacgttcgacagcgcggaagaagcagtcaagatcgccaacgataccgtctacggcctggctgcagccgtgtggacagccgatatctccaaggcgcacctgaccgccaaggccctgcgtgccggtagtgtgtgggtcaaccaatacgatggcggcgacatgaccgcaccgtttggtggcttcaagcagtcgggtaacggccgcgacaagtcgctgcacgcgttcgacaagtacaccgagctgaaggcaacctggatcaagctctaagcttcattgctgatcccctgtaggagccagcctgtgtgggagctggcttgcctgcgatagcatcgccgaggtgtggctgacacaccggggtgcctgcatcgcgggcaagcccgctcccacactggtttgtgtgttctcaaaagatatccacaggagcgtggaaatgcgttgggcgacttacttcgccgtcctggcctcggtactcagtgtcggcctggcgctgggcgtcagcatgccattggtgtccctgcgcctcgaggggtggggctacggcagtttcgccatcggcgtgatggcggcgatgccggcgtttggcgtgttgctgggggccaaagtgtccagccggttggcctcttggctgggtaccgccaacctgatgcgcctgtgcttgtgggcgggtgccgtctccatcggcttgctggcaatcctgcctagctatccggtatggctggtgctgcggttgatgatcggcgtgattctgaccatcgtgtttatcctcggcgaaagctggatcaaccagttggtggtagagcaatggcgcgggcggctggtggcgctgtatggctgcagttatgccttgagccagttgtcggggccgctgcttttgggtgtgctgggcactgatcacgactatggcttctgggtcggcgtgggcttgttgatggtcgcgccgctgctgttgctggggcgccccggtgcgccaacggccgaatccttcagtgtcaccttcggcgacctgtggcgcttctgccggagcctgccggcgatcgcttgggccgtggcgctgttcgccgccttcgaagcgatgattctgacgctgctgccggtgtattgcctgcagcagggcttcacggcggaagttgctctggcgatggtcagcacggtggtagtcggcgatgcattgctgcaactgcccattggcgcactggcggactacctgccacggcgcacgctgttcatggggtgtgcggtcttgttgctggcgtcgagcctggccattccgctgttgatgcacacgctgttgatctggcccgtgtgggtgctgttcggtgccagcgcaggcgggttatttacgctgtcgttgattttgatcggcgagcgctaccgcgacgatgcactggtgcgcgccaatgcccatgtggcgcaactgtggggcatcggctgcctgatcgggccgttggtggcgggggcgggcagccagtggatcagcgggcatgcgttgccgttgctgatggcagcgggtgcgctgggattagtgatgctcctgctgcgccaaggcgcattcggcgccgcgcaaccggcctgaccttgaaatgcaatcacctgtgggggctggcttgccagcgatggcgttgtatcagtcacacatttattgactgacactccgctatcgcgggcaagcccggctcccacagttgatctcctctagtcttagagcatgcgttccaggccgacagaggtagcgaaccaggcattgaacctgcgccaccagctgcccggctcgcgggtcagggtgtgtatttggccgttgtcttcagtcacccacaccacgttaccgtcctgcaatttcgcctcataactcaaggcaggcgccatgccctgcagcgccaggttgcgtacgtgttcggccaactccgggctgtccaccagcacgcctacttcggtgttccacagcaccgagcgcggatcgaagttaaatgagccgataaacgacttttcccggtcaaagatcattgccttgctgtgcaggctggaatcggagccatggaagctgccgcggcgaaacaggtgtgggccactgccgccactcgggtcgcccggttggcggcgcagctcgtagagtttcacgccgtgctccagcagcgccttgcgatagggtgcgtagccaccgtgtaccgcgggtacgtcagtggcctcaagcgagttggtcagcaggctcaccgacacgcccgcgtcggcgcggccggtcaggtataccagccccggctggcccggcacaaagtacgccgagatcatcatcagttcgtggttgacgccttccagctccggcgccagttgtgtggtcagcagcaggcgagggtcgggttcagcggtggccagtactttgctcggcgcatcccacagcgcctggttccaggcccagatcagctcgcggcgccagatgtccatgcgcggttgggttttataggtgcgcaagcggttgtacagcgcgtggttctgctggcgcgactcggccagcgacgcttccaggcggactcgagcggcggccaggtcgcccttggacggagtgctggagacgaaatcatcaatgggtttgctcagcgcgctgttccagtactggtcgaagctgtggcccagttgctcggccaccgggccgacactgagcatgtcgatatcggtgaaattcaggttgggctcggcgtcgaaatactcgtcgcccaaattgcgcccgccgacgatggccacgctgttatccgccagccacagcttgttgtgcatgcgccggtgttgcagcgacaggttgaacaggcggcccatggctcgcgtcacgcccgtgctgcggcccaggtgcagcgggttgaacaggcgaatctcgattttcgggtgggcggcgagggtcgcgatgacttggtcgaggccgtcgctggtggtgtcgtccagcaggatgcggatgcgcacgccacggtcggcggccttgagcagctcatccaccaacatgcgagtgctgatgccatcgtggacgatgtagtactgcaggtcgaggctggtctgtgcgttgcggatcagctcggcgcgagccatgaaggcttcgctgctgttgggcagcaagcgaaagccggagcggccttgatgtggcgcggcctgggcctggatcgagcggccgaaggaagattgcgcggcgggcagggcatcgctgggaatgcgcggcgtatcgacggtcgcgcagccgcccagggtcagagtgcccagcaggaaaaacggtaaaagccgtcgaatcatcaaaggcgctgcttccaggtcggggcggttgtgggcatatgacgactatttccggtgaaaggtcagtcctgcgcttcggccagcattttgatggcagcggcgccgactttacgcacggcttcttcaatctgcggggtcggcttggcagcgtagttcatgcgcaggcaattccggtatttgcccgaagcagaaaagatgctgccgacggcgacttgtacgccttgttccaccaactggcgattgagcttgagggtgtcgaagccttccggcagctccacccacagcatgaagctgccctgtggccggctcgcgcgggtgccggccggaaagtagcggctgacccagtcgagcatcaagtcgcgattacgctggtattgggtgcgcatccgccgcaaatgcggttcgaagtggccgcctttgaggaactcggcgatggcaatctgcggctgcgtcgccgtggagccggtgctgatgtatttcatgtgcagcacccgctccagatagcggcccggtgcaacccaaccaatgcgcagccccggcgccagggttttcgagaaggagctgcacagcagcactcggccatcttcgtcgaaggatttgatcgtgcgcgggcgcgggtagctgtaggccaattcgccatacacatcgtcttcgatgatcgccacgtcaaagcgctgggccagggtcagcagcgcctttttgcgtgcctccggcatgatgtagcccaacgggttgttgcagttgggggtcagctggatgaccttgatcggccactgttccagcgccagttccagggcttccaggctgatgccggtgatggggtcggtggggatttccagggccttcatgcccaggcctttgagggtttgcatggcgccgtggaagctcggcgagtcgaccgcgacgatatccccaggctcacaaatggcgtggatgctggcggacagcgcctcatggcagccggtggtgatcacaatgtcttcggcggtgagctggcagccggagtccagcgacagtcgggcgatttgctcacgcaattccatacagccgaggatattgtcgtaatacagcccgggcaggtcctggcggcggctcacacgcgccaggctgcgcagcaagggtttcatggtcggcgacaatacatccggcatgccgcggcccatctgtatgacgcctttgcgcggcaccgcgcgaatcagctccagcacctggtcccactgtgaaatttccaccgggcgctgagccgggcggcccacttccggcagggccggcagctcacggcccacgggtacaaaatagccggatttgggcttgggcatcgccaagccattgtcttccagcaagcggtaggcctgttgcacggtactcaggctgaccccgtgttccacactcaatgcgcgtacggatggcaagcgatcaccggggcggtagaagccctgttcgatgcgcgtgccgagcaattcggcgaggttgacgtagagggtcatggcggtcgctcctgcaggaccaatacagataggcggaaaatacaggattcagccgtctataggcagtgtctgtatggatttaataattgttggttgaatctgtaatggttttcctcacgcgcgcacgctagtcactcatggcaacaagcaaatgaggggcagcaaaatgagcggcatgagcgatgtgcggttggcgttacacggtcaggaattggaagcggagcaagagcgtgcgacagcgccacgcaatatcagccgctggcgtcttttctggcagcgccgccatacccgcaaggccttgctgcatttgaccggcgagcagttgcgcgatgtcgggctgagtgctgagcaggcgcgccaggaaggcctgaaacccttctggcgcagttgattcacaccagttctttaaaccggtgccacagcattcccagggccaagagtggcgagcgcaggtgcttgccgccggggaaggtgatgtgtggcacctgggcaaacagctcgaagcgcccctgttgctgaccactgatggcttcggccaacagtttgccggccagatgcgtggcgttgaggccgtggccggcgtaggcctgggcgtaatacacgttaggttgatctgccagccggccgatctgtggcaagcggttggcaccgatgccgatcatgccgccccattggtagtcgattttcacgtcggccagctgagggaacaccttgagcattttggggcgcatataggcgccgatattctggggatcacgccccgaatagtggcaagccccgccaaacagcaagcggcggtcggcggacagccggaagtagtccaccgctacgcgctgatcgcacacggccatattttgcggcagcaggttggcagcctgggcttcactcaacggctcggtggcgatgatgtagctgcccgccggcagtactttgccactcaattgggcattgaggccgttcaggtaggcattgcaagccagcacgagggtcttggcgcgcacattgccaagggcggtgtgcacgttgacttcggggccgtagtcaatgcgcgtcacttcggactgctcgaacagcttcacgcccagctgttgggcaacggaagcttcgccgagtgccaggttcaacgggtgcaagtggccggagcccctgtcgatcatgccgcccacgtagcgctcggaaccgatcacgccgctcatttcatgggcttgcagcaaacgcacttcatggcgatagcccagaccacgcaactcttcggcgtcttcggccaggccttcgaggtcacggggcttgttggcgaggtcgcagtaaccccaggtcaggtcgcagggaatttggtagcgctcgacgcgctcgcgcacgatttccacggcctccagccccatcagtttcatctggcgcacgccgtcggcgccgatcacgttggtgaattggtccaggccatggccaaccccgcgaatcaactggccgccgttgcgtccgctagcgccccagccgatcttgcgcgcttccagcaacacgacgctgaaaccgcgctcggccagttccagcgcggtgttcagccccgaataaccgccgccaatcacgcacacgtcggcccgcacttcgccggccagcgcggggtaatcaggctgtgggacgctgctggcggcgtagtaggaagcggtgtgccgggcgctggcggtcatggggagcatccctgtttggaaaatttgacgcaggatacagcggtcggacgaagctgtctgcgcgaggctttttgcggcagaattcacacctattcgcggttcggtaagtgttttgatgagttgcaacagtcagaaaatcagcgcgctgcgccgtcagattccttcgttcgagtgcgtccccggttgccacgattgctgcgggccggtgacgacttcgcccgaggaaatgtcgcgtctgccccgcaagaccgctgccgagcaggacgctgccatggacgagctgaactgcgtgcaccttgggcccaacggttgcacggtgtatgacgagcggccgctgatttgtcggctgtttggcaccaccaagaccctgccatgcccgaatgggcggcggccgatggagctgattcacccgcgggtggaaaagcagatccatgagtacatggcgagcacccggcaagtgctggtctaactcggtcaatgtgggagcaggcaagccagctcccacagttgactgagttgtgccggtcagtcggggatcggcaggttaaggctctctttcacctcttccatcacgatatagctcttggactcgcgcacatgcggcagcttgagcaagatatcgccgagcaatttgcggtacgaggccatctcggaaatccgcgccttcaccaggtagtcgaagtcgcctgaaaccaagtgacactccagcacgtggggcagtttgagcacggcgcggcggaactcttcaaaggtgtcgccggacttgtaatccaggctgatctcgacaaataccagcaaactccctttcaaatgctgcgggttgagccgcgcgttgtagcccatgatgatgccttcgcgctccaggcggcgtacccgctcagtgcacggagtggtcgacagcccgaccttttccccaagctcggtgaacgaaattcgcccgtcggtttgcaggatgcgcaggatattgcggtcgatcttgtccagctcccgcttggtctgggtgttggtacgcataggggatacgcctctgtgaaaagggtttttgccgagaattgtcgccaaatataggtgcttatatagtgaaatgcactggcaatagttttttacactgcgctcatcattgctcgaataacacacgtcagcggctaagcccgtgatgaggatataaaaatgcgcgttctggtcttgggtagcggcgtcattggggtgaccagtgcctactatttggcgcgggccggctttgaagtcgtggttgtcgaccgccagccagccgccgccatggaaaccagtttcgccaacgccggccaggtctcgcctggctacgcctcgccatgggctgcaccgggtgtgccgctcaaagccatcaagtggctgctgcaacgccatgcgccgctggcgatcaaggccaccgccgatatcgaccaatacctgtggatggcgcagatgctgcgcaactgcaccgccagccgttatgcggtgaacaaggagcgcatggtgcgtctgtccgagtacagccgtgactgccttgacgaattgcgcgctgaaaccggcatttcctacgaaggccgcagcctcgggactacccaattgttccgcacccaggcccaacttgatggcgccgccaaagacatcgccgtactgaaagagtccggcgtgccgtttgagctgctggatcgcgccggtatcgcacgcgttgagccggccctggccagcgttaccgatatcctcgcgggcgccttgcgcctgccgaacgaccagaccggcgactgccagatgttcaccacacgcctggtcgagatgtgcaaacagctgggcgtggagtttcgtttcgagcaagacattcagcgcctcgactacgccggtgaccgcattaacggcgtgttgatcgacggtaagctggaaaccgccgaccgctacgtgctggccctcggcagctactcgccaaaactgctcaagccgctgggtatcaaggcgccggtgtacccgctcaagggctactcgctgaccgtgccgatcaccaacccggcgatggccccgacctcgaccattctcgacgagacctacaaggtcgcgatcacccgtttcgacagccgcattcgcgtcggtggcatggctgaaatagccggttttgacctgtcgcttaacccgcgtcggcgtgaaaccctggagatgatcgtcaacgacctttatcctcagggcggcgatttgagcgaggccagtttctggaccggcctgcgcccgaccacacccgacggcacgccgattgtcggtgccaccccgttcaagaacctgttcctgaataccggccacggcacgctcggctggaccatggcctgtggttccggccgcttgctggctgacctgatggcgaagaaaaccccacagatcagcgccgcaggcctcgatatttcccgttacggtaaccaccaggagtccgcacaacatgtcaatccagcgccagctcaccaatgagcgcatgagccagatcgttgtccacagcggtaccgtgtatctggcagggcaagtcggcgacgacatgagtgccgggattgaaaagcagacccgtgaaaccctggccaatatcgagcgtttgctggatctggcaggcaccgacaagaccaaattgctctcggtgacgatctacctgaaggacatcgacgccgatttcgccggcatgaacgcggtgtgggacaagtggctgcccaaaggcgtcgcgccggcccgtgccacggttgaagccaagctgtgcgagccggacattctggtagagctgtccgtggtggccgcgctgccttaacgcaacatccctctcccggtgccggcgttgtcggtcggtaccggtttttttaccgctgcctagaagcctgccgccatgcgtcctgcccgtgccctgatcgatctccaagccctgcgtcacaactaccaattggcccgtgaagtcacgagggccaaggcccttgccgtggtcaaggcagatgcctacggccacggtgctgtgcgtgtggcccaagcgttggaggccgaggcggatgggtttgcggtggcgtgcatcgaggaagccctggagctgcgcgcggcgggtattcgtgcgccagttttgctgctggaaggtttttttgaggccgacgagctgccgctgatcatcgaacatgatttctggtgcgtggtgcattcgctgtggcagctggaggcgatcgagcaagccaggctgagcaaaccgctcaccgtgtggctcaagctggactcgggtatgcaccgcgtcggcctgcaccccaaggattaccacgaggcgtatcagcgccttttggccagtggcaaggtcgcgaagatcgtcttgatgagccacttcgcccgcgctgatgagctggattgcgtgcgcagcactgaacaagtggccgttttcgaggcggcgcgccaggggttgtcggctgaagtgagcctgcgcaattcgccgtcggtgatgggctggccgagtgtggccagcgactgggtgcgcccgggcatcatgctctacggcgccacgcccttcggcgaggaccaggccatcgctgcgcgcttgcagccggtaatgaccctcgaatcgaaggtcatcagcgtgcgcgaactgccggccggggagccggtgggctacggtgccaagttcatcacgcccaagccgatgcgtatcggcgtggtcgccatggggtatgccgatgggtacccgcgccatgcgcccactggcacgccggtgcgggtggccgggcagcgcagccaactgctggggcgcgtatcgatggacatgctgtgcatcgaccttaccgacgtgccacaggctggcctcgggtccacggtggagctgtggggcaaaaacatcctcgccagcgacgtcgctgcggccgccgagaccattccgtaccagatcttctgcaacctgcgccgcgtgccaaggctctattccggcgcttgaggcgggacgacgagccaggtcgcccgggatttaggtccaagtgttgtaaatactgaacgctgtcgccatgataacgttcaattacaacaaagcctgaatcctaggaggctcctgcattggacgtcggcgaacgactgcaatccatccgtaaactcaaaggtctttcccagcgtgagctcgccaagcgcgcgggtgtcaccaacagcaccatttcgatgatcgaaaaaaacagcgtcagcccctcgatcagctccttgcgcaaggtgttgggcggtatccccatgtccatggtcgaattcttttccgaggagatcctccaggaaataccgacgcagatcgtctataaagccaatgagctgatcgacatctctgacggcgccgtcaccatgaaactggtgggccgggcgcacccgacacgggcgattgcgtttcttaacgaaatctacccaccgggcgccgacacgggcgaagaaatgctcacccatgaaggcgaggaaaccgggattctggtggaaggtcgtctggaattggtggtcggtcttgaaacttttgtgctcgaagctggcgatagctactactttgaaagcaccaagccccatcgttttcgtaacccgttcgacgtgccggcgcgactaatcagcgcagccacacccgcgaacttttgacacaagaggcgtgctgccagcgttgcagacacccccgtcgctgtaaccgtacggcctaatctccctttatttaatagggttgtttcggccttgcgggctaaccgttatactttcgccgcctgcgaaaccgtggccgcaggcgtgaatagccaccattgagggtgaacgcgtgaacctaattatgaaaatgctggctgcaccagcaaccgtactggccctatgggctgtcagcgctcaagctgcgaccaatgatgaaattgccaagcgcctggagcctgtgggccaggtctgtgtccagggccaggaatgtaaagggatggaagtcgcggtggcagccggtggcggcggtggtgcaaagacaccggatgacgtgatcgccaagcattgcaacgcgtgccacggcactggcctgttgggcgcgccgaaaatcggtgacgctgccgactggggcaagcgcgcgaaggagcaaggcggggtagacggtctgctcgccaaggctattacgggcatcaacgccatgccgcccaaaggcacctgcagcgattgctcggatgacgagctcaagggtgcgatcgagaagatgtcgggcttgaagtaaaccgatcttcgccaaaaagccgctttcgagcggcttttttgtgcctgccatttgtgtttcggtgctgttcattgcagcaaagacccggcaagctcggtccaacccctaatcatggaatgttcaggagggtcggatggtgcagttgtgttcaatcgagcaagcagttgacgacgtactggcacgcttgccggcgcatatccacatgggcatgcctcttgggctgggcaagcccaacctgttcgtcaacgcgctgtaccggcgtattgccaagttgcccgagcgggcgctgacgatctacaccgcgctgagcctgggccgcccgcccttcggcgatggtttgcagaagcgctttctcgaacccttcatcgagcgcgtgtttggcgattaccccgagctggatttcctcgccgacctgcacaaggacaagctgccggccaacatccgcgtgcagcagttcttcatgcagccgggcagcctgcttcacagcgcatcggcccagcaggactacgtcagcagcaactacagccatgccgcccgcgacatcaacgccgccggcctgaacctggtggcgcaattggtggccagcagtaccgaacaccctgaccgcctgagcctgagctgcaacccggacatcaccctcgacctgctgccgatgattgaaaaacgccgtgacgcgggcgaaaccattctggtggtcggtcaggttcacagtgacttgccctacatgcccggcgactccgagctgggcatggacgccttcgactacctgattgacgccaaggacagcaccacgctgttctccacgccgaacatgccagtggggttccaggaccactttatcggcctgcatgccagcaccctcgtgcgcgatggcggcaccctgcagatcggcatcggctccatgggcgatgcgctgactgccgccttgctggcgcgccaggccgataacgaggcctaccggctgctgttgactgacttggacgtgtaccagtgggcgccgctgatcagccgcgaaggtggtgtcgaccccttcgcacgtggcctttatggctgcagcgaaatgttcgtcaacggcctgctggtgctggcagatgccgggattatccggcgcaaggtctacccggacgtggcgactcaggaacaagccaacgcgggcacactggatgatgccgcccagcccgacggcgtgtcgatccacggtggtttcttcctcggaccacgcagtttttaccagcgcttgcaggaaatgacccacgccaagcgcctcgaattcaacatgacccgcatcagctacatcaacgagctgtacggcgaggaacaactcaaacgcctgcaacgcctggacgcgcggtttatcaacagcgcgatcatggtgaccttgctcggcgcgggtgtggccgaccagttggaagatggccgcgtgctcagcggcgtcggtgggcagtacaactttgttgcgcaaggccatgcactggaaggcgcgcgctcgatcctgattttgcgcagctggcgcgagtcggcgggggaggtcagttccaatatcgtttgggaatacggccactgcacgattccccggcatctgcgggatatcgtgattaccgagtacggaattgcggacttgcggggtcagacggatgccaaggtgatcgaggctttgctcaacatcaccgactcacgcttccaggatgagctgatcgagcaggcgcagaaggctggcaagttggcagatgatttccagctggatccacgctttgccgacaacacgccagaacgcttgaaagccattcaggccaaacatcggcggctgttcccggagtatccgttaggcagtgatttcaccgacgaggagcgggatttgttgcgggcgttgaactggctcaagagcaaattcaagctgacggagattctggaactcggcaaggcagcgctggatgcgccggagccggaggcgtttcccgagcatttgaagcggatgcggttggatcagccggaggggttgaaagaggacctctatcagcggttgctgctcgccggtttacaggccaccgcgcactaaccaccgccacaaaaccaactgtgggagctggcttgcctgcgatgaggacctgtcagacgacatcgttgtcgcctgacactccgctatcgcaggcaagccagctcccacattttttaccgtgcccactcaggggcagtggtcactcgatgaaggtgacgacgccacccgccagcgacttgacccgcgccagcgattccacccggtaaccctgcgcatccagctccgcacggccgccctggaacgacttctcgatcacgatccccaggccggcgacggtcgcgccagcctgcttgatgatcgaaatcagcgcctgggacgctttgccgttggccaaaaagtcatcaatcaccagcacacggtcactgctggtcaggtggcgcggggaaatcgccacggtgctttcgactttcttggtgaaggaatacaccgtcgccgacagcaggttttcggtcagggtcagggactgttgcttgcgggcgaagatcaccggcacgccgaggttcaggccagtcatgatcgccggtgcgatgcccgaggcttcgatggtgacgatcttggtgatgcccgagtccttgaacagcgcggcgaattcgtcgccgatcagtttcatcagcgccgggtctatctggtggttcagaaaggcgtcgaccttgagtacctgatcggaaagcacgatgccttcttcgcgaattttcttgtgcagtgcttccacggaaagcttcctctaatggcgcggtgtgcgccgaaagtagattgaaaagtagtcgattctagcgctttaacatcgcgcgtatatccgccagggcggtgttgccgcgaacggctttcacttcggtcggtgtgtcgtcgttgccttcccaggcgaggtcgtccggcggcagttcatccaggaaccggctgggggcacaatcgatgatttcgccgtattgcttgcgcttggcggcaaaggtgaaggccaacgtctgacgcgcgcgggtaatgcccacgtaggccagccggcgttcttcctcgatggtgtcggcttcgatgctggaacggtgcgggaggatttcctcttccatgcccatgatgaacacgtaggggaattccaggcccttggacgcgtgcaaggtcatcatctgcacaccttcggcgccgtcttcctcttcctgttgacgctccagcatgtcgcgcaataccagcttgccgatggcgtcttcgacggtcatctcgccttcttcgtccttctccagcgtgtttttcaacgcttcgatcaggaaccagacgttgcccatgcggtagtccgcggccttgtcgctggagctgttggtgcgcagccagttttcatagtcgatgtccatgaccatgctgcgcagagcgctgatcgggtcttcgccggcacactgctcgcggaccttgtccatgaagcgcttgaagcgcgccaggcggtcggtgaagcgcgtgtccaggtgctcgcccaagccgatttcgtcggtggcggcgtacatcgagatcttgcgttcggtggcgtagttgccgagcttttccagggtggtggaaccgatttcccggcgcggtacgttgatcacgcgcaggaaggcgttgtcgtcgtcggggttcacgatcagccggaagtaggccatcaggtctttcacttcctggcgtccgaaaaagctgttgccgcccgacagacgatacggaatctgatggtgctgcagcttcagttcgatcagcttggcctggtagttaccgcgatagaggattgcgaaatcgctgtaaggccggtcggtgcgcaggtgcaaggtcagcagttcgacggccacgcgctcggcttcggcgtcttcgttgcggcagcggatcacgcggatttcatcgccgtgacccatctcgctccacagctgtttttcaaactcgtgggggttgttcgagatcagcacgttggcgcaacgcagaatgcggctggtggagcggtagttctgctccagcatcaccactttcagggacgggtagtcgtccttgagcagcatcaggttttccgggcgggcgccgcgccaggcgtagatcgactggtcgtcgtcgcccaccacggtgaactggttacgcttgccgatcagcatcttcaccagcaaatactggctggcgttggtgtcctggtattcgtccaccagcaggtagcgcaccttgttctgccatttttcgaggacgtcggcgtgttcctcgaacagcttcacgggctgcaggatcaggtcgtcgaagtccaccgcgttgaacgccttgagcgtgcgctggtagtgggtgtaaacgatggcggcggtctgttccttgggggtgcgcgcgttttccagggcctgggcgggcaggaccaggtcgtttttccaggcgccgatcatgttcttgatctcatccacgccatcgtcgcctgcgtattccttctgcatgatgtcggtcatcagcgacttcacgtcggtctcgtcaaagatcgagaagcccggcttgtagcccagccgcgcgtgctccttgcggatgatgttcaggcccaggttgtggaaggtacacaccgtaaggccacggccttcgccacttttgagcaaggtgccgacacgctccttcatttcccgcgcggccttgttggtaaaggtcatggcgacgatgtactgagcgcggatgccgcactgctggatcaggtgcgcgatcttgcgggtgatcacgctggtcttgccggaaccggcaccggcgagcaccaatagagggccgccgacgtagttcacggcttcttgctgccggggattgagtcgggacatacagaattcagggagtcgttgaacaaaagggcgggcattttaacaggctcgcaggattctgctctcacagaacgacagtgtgacgtaccactcgatctaaatttgccggttttgatactttgccgcaggatgtggtgggcttatttcggctaaggttgcgattaacgtctgtagtctgcgtatttgataattcctatcattggtgattgtcaggccgcacgtcataatgcccgccgccaacgaaatcttgcagagtctagggagctagcttgtctacgcctgtcgaacccttgcgtttgctgctactggccgatgagccagcgtgggcagcgttattgcgcgagtgcctggtgccgatgggcgatggggctgtgctgatcagtgcgcccaactgggactcggtgagtcgtctgttcgatgacgaccacggtgctgtgctattgaccacgccaggcctgcaacccggcccgggccgatgcagcttgccgtgtgtgttgctgctggaacaggagccgctggtttcgccgcttggcgtcagtgactggctgatccgtgatgtattggatgctgatacattgcgtcgctgcctgcgccacgtccgcgagcgcggcgtactggaaaataccctgcaacgcctggccgaacaggacccgctcaccggcatcgccaatcgccagggtttccagaccttgctggcggcgcgcctggcggaaaacgaaggccgcggcctggccctcggccatctggacctcgacaattttcgccatgccaacgatgccctcggtcatcaggccggtgaccggttgatcctgcaagtggtgtcgcgcctcaagagccagctcgaggccggggaccaattggcgcgcttgggcagtgatgaatttgcgttgctgattgacacccgtcgcgcgccccagcgcgccgagtggatggccgaacgcatcaccgaagtcatggccgagccctactgggtggatggcgaaagcctgttgatcggctgcagcctgggtgtggcccacgcccgtgcgcgtgccggcgccgaccccttgatgtggcacgcacacatcgccatgcaacaggccaaaagcacccagggttgcacctttcatatcttcaatgagcgtatcaaccgcaacgcgcgcagtttggccgacctggaaagcgaactgcgccgcgccttgcgccgcgacgaactggagctgcattaccagccgcgcctggatctggacgacgggcatatcgtcggcctggaagcgttggtgcgctggcgtcatggcgagcgcgggctgttgccgccgagcgaattcgtgcccttggccgagcaaagcgggctgatcgtgccgctgggctactgggtgatttcccgtgccctgcgcgacatgcaagacctgcgcgagcgcggcctgccgccgctgcacatggcggtgaacctgtcgttccgccagtttcaggacagccagttgctgtcgaccttgagccggttgattgccgagcgtggtgttgaagctcagtggctggaattcgaactgactgaaaccgccgtgatgcgccgcagcgatctggtcaagcagaccatggacgccctcggccgcctgggtgtgcggttttccctggatgacttcggcacgggcttctcctcattcgtgcacctcaacagcctgccgattgccctgttgaagatcgacaagagcttcgtcggcggcatggaagagcgcgaagagaaccgcaagctggtgcacgcgatgatcaacctggctcacaacctgaatctggaagtggtggcggaaggtgtggaaacgcctgagcagttggcgttgctgcgtttgtttggttgtgatcaggctcagggttatttgatcagcaagccactgccgttgcaggagctggtggagtatttgacgttcggcaagagccagcaggctttgttgggctgagtgttgcaaacccgatcaactgtgggagctggcttgcctgcgatagcggtgcatcagtaacagatgttttgcctgacacactgtcatcgcaggcaagccagctcccacagggactgagtacatcccatcagtcgggctgcatggcctggaattcagcgcgaacttcaggctctcgccgaatcatccgcttcatcttcacctcaaacgcccaagtcaagctcactgccgcgcacgccagccccagcgccaggccccaccacacgccggtcggcccccagcccagggtgaacgccatcaaccatgcggacggcgcgccgatcagccagtaacaacccaaacccaccagaaaggtggtcttggcgtccttcagcccgcgaatgcagcccatggcaatggtctgcacgccgtcgaacagttcaaaccaggccgcgacagccagcaagctgacggccaatacgatgacgtcatggaaggcggggtcgttatggtccagaaacagtcctattaacgggtcggaaaacagccacagcacagcggcgaaccccaacatcaccgccgcaccaaagccgatgccgacacgcccggccagacgtgcatggaccaactgcccggcgccgtaatgctggccgatgcgcatggtgatcgcgtaggacatccccgccggcaccatgaaggccaccgagacaatctgcagggcaatctgatgcgccgccaactgcgtgctgcccatggtgcccatgcacagcgccgcgaaggcaaacagcccgacttccaccgcgtaggtgccgccaatcggcaggcccaggcgccacagctcgcgcaaatactgggtgttgaggtgcagcagacccttgccgagcgggtaggctgcgtaagcccggtgaatgcggatgtaccaccacagcgccagtgccatgcagttggcgacaatggcggtcaccaggccgatgcccatcagccccagtttcggcaggccgaacatgccctcgatcaacgcatggttgagcaggtagttgagcaccgtgccgcacaggctgatcaccatcaccggggtcgctttgccgatggcgctggtaaagccgcgcaaggccatgaagctcaggtagccggggagggcaaagggcaggatcgtcagaaattgccccgccgcgtgcacgttggtttcggtctggccgaacatcagcagtaccggcttgaggttccacatcagcaacgccgccgccagcgccatcaaccacgccagccaaagcccggcctgggtcaggcgggttgcgccttcgatatcgcccgcgccgtggcggatggccacaagggtgcccaccgccgcaatcaccccgatgcagaaaatcgccacaaacgaatagctcgccgcgcccagcccgccgccggccaaggcctcggggctcaggcgagccatcatcagggtgtcagtcagcaccatcagcatgtgcgccaactgtgaggcaatcaacggccccgacagccgcagaatggcccagagttcggtacgtgccggatgttgcatgatcatcacactcgaaaagtcagagggttggggaagggttgattctcggcgctttgcgcctattgcacaaaaggataaaagcgatggttcgcatgattaaaactcatgcaatagcgattctggtagggtttgggcattgcgccgtcggagccttgcccaatgtctcgtcgtctacctccgctttatgctcttcgggcttttgaagctgcctctcggcacaactcgttcacccgtgcggcggaagaactgtccattactcaaagtgcagtcagccggcatatccgcacccttgaagagcatttcgcctgccgcctgttccagcgcagcgggcgtagcctgcagctgactgaagcggcgcgtctgctattgcccggtgtgcgcgaaggtttcgcggcgctggaacgcgcctgtcataccctgaatgccgaagacgacatcttgcgcatgaaggcaccgtccaccctgaccatgcgctggttgctggcgcggatcagccgcttccgcgccttgcagccgggcaatgaggtgcaactgaccagcgcgtggatgagcgtggatgaagtcgacttcaaccaggaacccttcgactgtgcggtgctgttgagctacgggcattttccggcagattgggaggcgtgctacctgttccccgagctgctgattccggtgggcgcgccgaacctgctcaatgatggcccgtgggacgtgaaccgtctggcggctgccgagttgctgcaccccacgcccgaccgccgcgactggcgcaactggctggagcgcatggggctgtcgtcccaggtttccctcaagggcgggcaggtgttcgacacgctggagttgggcatgatcgccgccgcgcgggggtatggtgtgtcgatgggggacctgctgatggtggccgaagacgtagcccaggggcggttgagcctgccttggccgacggcagtggcgagccgggaaaattactacctggtgtggccgaaaacccgccccggcggcgaacgcttgcgccgcctggcggagtttcttcagggtgaagtcaaagccatggagctgccccgggttgaacgtctggattgatcgttcgtgcaatcgtttgcgcgatacccctgtgaatcgctcaagtattggccgcgcccgccgaagaaggtgtgttggaaccccccgcgtttcaacgtttccaacccgataatttgccgagcaacgctaagagatcaggatgatcctggcctcggccaggagcttctatgtctcaacctcgcgctcggatcgcgtcccagttaggccttgccttggccgtgattctggctgtcgtcatcagcggcagcactgtcttcgccctgcgttctctcgactccgccaacctcgacacccgcgaggagcacttggccagcgaagcacgcctgctcgccgaccaactcaacaccttccacagtaccttgcgcgaaagtacccagcgtttgagcgggctgtttgaaaagcgcttcggcgccggcttgagcgtgcacgcggaccagccagtgaccgtggccggtgtacagaccccgagcctttacctgggcgagcaggtgctgaacaacaacttcgatgaagtggacgagttcaagcaaatgtccggcggcgtggccacggtgttcgtgcgcagcggcgaagacttcatccgcatcagcacctcgctgaccaagcaagacggcaaccgcgctatcggcaccgtgctcgaccaccagcacccggcctaccagcgtttgctcgccggccagagttatgtgggccgcgcggtattgttcgatcgttcctacatgacccaatacagcccggtgcgtgacgccagcggcaaagtgatcgccgtgttgtttatcggttttgattacaccgacgagcagaaggcccagttcgataacctcaagcgcttccgtatcggccagaccggctccttggcgttgctggatgaacagaagcactggctggtgccaccggcgggcgtgcaggcgctggatcaggcggttccggtgatgctcgacctcgcgaaaaagccgggcgaaggccgcttctggagcgacaagaacgaagatttctacagcgtctcggtgccgtttgaaggtggcccgtgggcggtggtggcgagcatgccgaaatcggaaatccgcgccgtgacctgggccgtcggtattcgcctggtgattggcagcgtgctggcgatgttattggcagtgggcgccgcggtctggctactgcgcagtaaattgcagcccctgagtgatctggtgcgtcaggccgaagccttgggcgcgggggatttgagcgcgcgtttgaacgtgtccagccgcgacgaaatcggccagttggcgggcagcttcaaccagatgggcgaagcgttgtcgaccatggtttcgcacattcgcaaggcggccgaagaggtcaacagccgcgcgcaggcgctgtccggtttatccgggggcgcctatgaaggcatggagcaacagtctggcgagatcaccagcatggccggcgcggtcgaagagttcagcgctacctcattgaacatcgccgacaacatgggcagcaccgaacggcttgcacaggaaaatgcgcagcagacgcggattggccgcacctcgatgcaagaggcgtcgtcctccctggagcatatcgctaccgcgctgaacagcacggccacagtgatcaacaccctgggtcagcgttcccaggaaatcggcgggatcgtcggggtgattacctcgattgccgagcagaccaacctgttggcgctcaatgccgccatcgaggctgcccgcgccggtgagcaggggcgtgggtttgccgtggtggccgacgaagtgcgcaacctggcatcacgcacccgtcaggccaccgatgaaatttcagtgatgatccagagcatccagcaggaaaccggcaacgccatcagcaccatggaacacggtaacgtgctgatgcaggaaggcctgtcgcgcaacgccgacgtggcctcggccctggcgcgcatcgacgagcaaagccgctccgccggccaacagtttgccgcgattaccaccgccacccaggagcagagcagcacggcgaacgtactcagcagcaacctgcaaagcattgcgctggccaacagcgagcagcgcgaagtggtctcgaacctggcgatcaccgccaaggaactggaaaccctggcggcgggcctgcgccatgaagtggaccgcttccgctaaggcttggcgtcgcccaggccggggtccacgcgcttgccgatgtccttgagacgcgccagttgatccaccatgcctggcgcttcgtcgaggctgctgacgaaggtccacaggtacgtcatgaccgcgtaaacgtggccggcttttacggctggcgacagtgccaactggctgatcgcgaccacaaacagcagggctgccagcgtaccgataaacaggaacgcggcggcctcgcggtctgacagccagatgcgcaggcgtgacagcacctggtaatgacgctgcaaggtctgggcgccgaccttttccaccaggccgatttctttttccaggcggtcgttcaagcgctcgtgcaactgctggttgcgccgcgcaaagcgtggcagcaacgtggtgcacagcagcaaggcgctcaggcacgcgaggccgatccacggctcgatcaccagcaacatcacggcggcgccgacgatggacaccagcgccgtagcgatgatcggcacatgtttttcgaagaaatccacaaaatcccgcgccagtaccacccgtgccgccgcgcgcgaagtgctgtggttttgcaggcgttgattgaggattaccggcaccgcgaggtcggcgtagatgcgcgtaaaggtgcgcgtgtccagcgcacggcgtgccgccccgacgacccagaacgccagaaccacggcggcgtaaaacagtgcgctgcccgcgtcgccccggataatcgagtccaccgcgaacccggcaaacagcgggtatgccagtagaagcgcgttctccagcgcaaccagcgacagcgtgcaaaacaacttgccggggtaggccctggcgatcgccttgagggtttggctggcggactgttggccgattttcttgctttcttcgataagaatttgcggtgtgacggatgacatgggtgcaccaaaggagtgttagacgctatcattgagcgactgctcaagtatccttgagcgaccgctcaaaaagcaagcgccgctcatctatcggtgcctgaaggaattgcccatgtcgcgtaccgaccgtaaagaccagatcattgccgctgccctggagctgtttcgcagcaagggtttcgccgatgtgtccacccgtgatctggccgagcatgccgggctgtctcgcagccatgtctatcactacttcagcgactggaatgagctgcgccgcgaagcctttgtacggtttgccaatgagcaactggacgaagtccgcgcgccgctggtcggcctgccgccgcaggaggcgttgatggggttcctgcgtgattgcctgccgtgtaccgctgacgccggctgggcgctgtggctggatgcgtgggacgaagcgatgcatgacccgcaaatggctcaggcctatctggtaatcaacgcccagtggcaaggcatgctcgccgaggtgattgagcaaggcgtggttgccgaagtgtttcgctgtgattcgccaacacgcgccgcccggcagatttttgccgtggccatggggtatgccgatgacctgatgctcaagccctccagcgaatctgccgaggcggcgctggatgaggtgatggaagtggcgcggttgctgctggggttcaccgcgtagggctgccgcacagagggctagttcaatgccgctgggcgatattgcagcgcctcggccaaatgatgccgggtgatgttttccacctgttcaaggtcagccagggtgcgcgcgaccttgagcagtcgatgggccgcgcgcagcgataacgtcagccgctcgcaggcgctttccagccagccctcgtcggctttcgccagctggcagtgcgcgcgtaaccccggcagatcaagaaacgcattggcacagccctggcgcttttgttggcgctcccgggcttcggcaacttctgctgaggcttttgccgtgctgtcgccgggctgttgggtcggattgagcgcggtggtttcccgggcgacggtgagatgcaggtcgatccggtccagcaatggcccggagagcttgttgcggtagcgctggatttgctccgacgtacagcggcaacgcccgctgggttcgcccatatagccgcaggggcaggggttcatggccgccaccagttggaaacgggccgggaaactcacgcggtcacgggcgcgggaaatcacgatatgccccgactccaatggctcgcgcagtacttccagcaccttgcgatcaaactcgggcagttcatccagaaacagcacgccgtgatgggcgagggtgatttctccaggctgcggcttcgacccaccgcctaccaatgcgggccctgacgcagaatggtgcggctggcgaaaaggtctgtgcggccagtggctcaagggtgcgaggctgacaactgactgaatcgcagcgacctccagggcttcctgctcactcagtggtggcagcaagccgggaaggcggctggcgagtaatgtcttgcctgtgccgggggggccgctgaacagcaggttatgcgcgcctgctgcggcaatcagcaaagcgcgtttggccgccaattggccttgcacctcactcaagtccgggtagggtttgttcgagtacagcaagccgtcggacttgtagggctcaatcggcacctgcccattcagatgcgcgaccacctgcagcaggtggtccacagcaatcactttcaaccctgatgccaggcacgcttcctcggcatttgctcgaggcactatcacggtgcgcccggccttgcgtgccgcgagtgctgccggcaacacgcctttcaccgcacgcacctcgccggacaacgccaattcccccaggcattccacgtcgtcgagcatcaatgacggcacctgcacgctggccgccaggatccccaaggcaatcgccagatcaaaacgcccgccgtccttgggcaggtcggcgggcgcgaggttgagggtaatgcgccgggcagggtattgcagtgcgcagttgaggatggcgctgcgcacgcggtccttgctttccttcacggcggtttccggcaggccgaccagcgtcagggatggcagcccattggccatgtgcacttcgacggtgacggcgggggcttcgacgccgatttgggcgcggctgtggacgatggcgagggacatgctcgttccttgaaagggaggccgcttcctgcgggtttttcaagggtagacgaggtggggaagggtacggcgggggaggttttacagaacgtatccaaagcagcccgcagcgctttaggtgggagctggcttgcctgcgatggcgctctatcagttagcgctgtgatgtctggcccaccgctatcgcaggcaagccagctcccactggggcgtgcttattcagcagagggtggcgtcagccgcgcttccagctcggccaccttcgcctccaggctctccagccgcgcccgcgtgcgcgccagcaccaccatctggctatcaaattcctcccggctcaccaggtcgagtttgatgaagccactttgcagcaatgccttgaattggctttcgatttcgttgcggggcagcggggtgtcgccgctgaacaagcgagaggcgtggccgctcagggcgtcgaggaggtctttgggcgcgagcatgggaaatattccggaaaactgttggccggcagtgtatcacgcagcgtctatagtctttttcgcaggccagggcgcacgcttttcgcgcagtgggccgggcgctcgcgcaccgtttgagtgcgcaatggcgccgccaaaaagccccgcaggtgggcataagtgggcaaaggactgatttcagtgatttttacggagctggcaaggtttctgcttagacgatcatgacccatgcactgatgcagtcgctgtgacgaatgcagtgcgccgacggatcaggggtacaggtttcgtcaccagtggttcgctggcgtcgcaacggtaaatgccgaggcgacgacgcgttacaaagccaggcactgcgcttagacttgagacgggtttgttttcctggggcaagtccaccaattcgggagagagttttcatgaagctagtcactgccatcatcaagccgttcaagttggacgatgtacgcgagtcgttgtccgagatcggcgtgcagggcattaccgttactgaggtcaaaggcttcggtcggcagaagggtcacaccgagctgtatcgcggcgcggaatacgtggtcgatttcctgccaaaggtgaagattgatgtcgccattgacgacaaggatcttgaccgggttatcgaggcgataaccaaggcggccaacaccggcaagatcggtgacggcaagatcttcgtggtcaatctggaacaggctattcgcatccgtaccggcgaaaccgataccgacgcaatctaagccgccaaacccccaacgccccaggagaaaacaatatgactctgcgtaaattcgcagggctaggagccctgttgtccctcgtaatgccggccctggcattggcggcggacccagcccccgctccagtcctcaattccggcgacacggcgtggatgctcacatccaccgcgctggtactgttcatgaccattccgggcctggcgctgttctacggcggcatggttcgctccaaaaacattctgtcggtgatgatgcagtgcttcgccatcactggcctgatctccatcttgtggttcgtgtacggctacagcctggcgttcgacaccacgggtatggaagcaggcgtggtcaacctcaactcgtttgtgggtggcctgtccaaactgttcctctcgggcgtgaccccggccagcatcaccggcccagcggcgttgttccctgagtcggtgttcgtcaccttccagatgacgtttgccatcattacacctgcgctgatcgtgggtgctttcgccgagcgtatgaagttctctgcgatgctgatcttcatgggcatctggttcaccctggtttacgcgccgattgctcacatggtgtggggcggtccgggttctttgctgggcgactggggcgtgctggatttcgcaggcggcaccgtggtgcacatcaacgctggtgtggctggcctggtggcgtgcctggtactgggcaagcgcaaaggcttcccgaccaccccgatggccccgcacaacctgggttacaccctggtcggcgcggcgatgctgtgggtcggctggtttggcttcaacgccggctccgccgctgcggccaacggcactgccggcatggcgatgctggtcacccagatcgctaccgctgctgcggcgctgggctggatgttcgccgagtgggtcactcacggtaagccaagcgctctgggcatcgcttcgggtgtggttgcgggcctggtggcaatcaccccggctgccggcacagtgggcccgatgggcgctctggtcatcggcctggcggctggtgtggtgtgcttcttctgcgccaccaccctgaaacgcaaactgggctacgacgactccctggacgccttcggcgtacacggtatcggcggtatcctcggcgcgatcctgaccggtgtgtttgctgcgccggcgatgggcggcttcaacgccaccaccactgacatcgcggcgcaagtctgggtccagtgcaaaggcgtcggcttcaccgtgatctacacggccatcgtgaccttcatcatcctcaaggtgctggatgcggtcatgggcctgcgggttaccgacgaagaagaggccgtgggcctcgacctggcgcaacacaacgaacgcggctacaacttgtaagtacgtgtaaaaaagatgcccggcttgccgggcatttttttgtctggcgtttgtctttggctaaaggtgtatgggttttttatcgactttgtgatgggatctacacggcacttttgagggtgcggatgtcttacaggcatgtaggcgtattcgacactttgttttttcccagagcgcgctagaatgcgcgccgatgggcggagaactgtatgtggcaacagaccctgataaccctgcgggccaagccccggggctttcacctggtgacggacgagttgctcgccggcttgcctgaactgaaggcgtgtcgcgtgggcctgttgcatctgtggctgcagcacacttcggcctcgttgacggtcaacgagaatgccgacccggcggttcgccgtgacttcgagcgttttttcaactcgctggtgccgcaagggcgtgcagggttcgaacatgacgacgaaggtccggatgatctgccggcgcacttcaaggccagtctcctgggctgccagctgagtttgccggtcaaggccggccgcttggcgataggaacctggcaaggtgtttatctgggcgagcaccgtgatcatggcggtgctcgtaaagtcctcgccacgttgcatggtgatgaggcataagccactggttaaccagtggatgttgattttttcccggcgccctcgacagggggtgaagctgggctataactaatctgcttttcgcaagtcatgaggtagaacatgagcgacgatgatctggaaaacgacgaactcgaagtaggtgacgacgacgagaccgaggaaggtcttgaagcggccgtcgaagacgttgctgacgagggcgatgacggcggcgatgacgcacctgccaaagcagccaaaggcaaagccaaggccgctgtttcggtagacgaattgccgagcgttgaagccaagaacaaagagcgcgatgcgctggcccgcgcgatggaagagttcctcgctaaaggcggcaaagtgcaggaagtcgaggcgaacgtggtagctgatccaccgaagaagcctgataacaagtacggcagccgacctatctgaggtcagttatcgcttgtaagaaaaagcccgccgtcgctgcgggctttttcatgcctggaataaagtcctacaggtcgacgtgagtctactgtgggagcgggcttgctcgcgaatgcgatgtatcagtgactaatgtactgactgatacaccgcattcgcgagcaagcccgctcccacattttgatcgctggtgttactgccagctgcgcagcaacggcggcaactcggtcaggctgcgaatctgcgcatccggcttcttgtccgcttcccaggccttgcccgtcgggttgaaccacaccgctcgcagccccgcctgctgcgcgccggcaatgtcatcgcccggatgatcaccgatatgcaccgtttggctcgcatccacgccaccgcgctgcaacgcttcctgaaacaaccgcgaatccggcttggcgatgccgatgtcttcggcgcgcaaggcgaagtggaaatagtcggccaggcccacgcgctgcacgtcagcattgccgttggtgatcacgcccagcaggaagtgctggcgcagggcttgcagcatcggctcggcttccgggaacggcgtgagctggtgccgcgcgtgaatgaacgcctcgtagcacacatctgccatttccgtggcctgcggctgtggataaccggcttcttcaaaggcgtgcatcaacacgcggtggcgcaggatgctgatgcggtatttcagctcgggatggcgctccagcacggcctggcgcagcttggcgaaatgctccagcggcaagtcgcccactttggaggcgttcaccgccagccattcacgcatcgacgcttcggcgctgatgatgacgggtacgttgtcccagagcgtgtcgtccaggtcgaaggtgatcagcttgatgctcatgtgtcgctgcccttgatgcgtttggcccgtgggtgggcgctgtcgtacaccgttgccaggtgctggaagtcgaggtgggtgtagatctgtgtggtcttgatgtcggaatggccgagcaactcttgaaccgcgcgcaggtcctgtgacgattccagcatatggctggcaaacgagtgccgcagcatgtgtgggtgcaggttctgccccagttcgcgctcgccggcggccttgacccgtacctgaatcgcccgcggcccgaggcgtcggccttgttggctgacaaataccgcgtcatctgccgggttggtcagcaggcgcagtggcagccacagctgcaaggcttcccgggccttacggcccactggcaatacgcgggtcttgctgcctttgccgagcacctgcaccaggccgtccgccaggtccagttgatccaggttcaggccggtcagctctgacaggcgcaggcccgaagaataaaacagctccaggatcgcctgatcgcgatgggcgaggaagtcgtcctcaacggcgccgtcgagcagttgcaaggcgcggtctgtatccagcgtcttgggcaggcggcgctcgccttttggcggagacaggccgttggccgggtcgtggtcgcacaagccttcacgattgaggtagtgatagagcccgcgcaccgccgagagcaggcgtgacaggctccgcgaggattgacccgcctggtgcaggcgcgcgatcaggctgcgcaggctctggatgtccagggccttccagctgctgatctgttgtttctcgcagtacgccaggactttgttcaagtcgcgccggtaggcttccagcgtgtggggcgacacctggcgctcgttgcgcaggtgagcgcagtaagcgtccagttgccgttccatggctagcgcaccgcgcgcagggcggtggtaaagcgcggcagcacgcggcccagcacttcggcgatgtaggtcaggaacagcgtgcccaccgagcttttgtagtgctgtggatcgcgactggcgatcgccaatacgccgtgcaagccttgatggctgagggcgaccacggcggtggagccgatctgcacgcgctgctcggcgccaaacaggaagtccagctcgtgctcgcgcaaggtgccgctgatggtcttgccttcggatagcagcccgccaatcgcggtttgcgcttcgccaccgctgacccagcggcccaccggcatcgggttgtcgctgaacaggatcaggctcacaaagggcacctggaagtcctggcgcaggctgtcttccacggcaatcaccgtttcttccaggctggtggcgtccatcaaggtaaggatcagccggcgggttttctcgaacagacggtcgttgtcgcgggcgacgtccatcaagtgcgagagcttgtggcgcatttcgatattgcgctcgcgcaggatcttcatctgccgctccaccagcgacacggtgtcgccgcgctggtggggaatgcgcagggccggcagcagctcttcgtgttcgacgaagaaatccggattagcctcaaggtacgccgcgactgcagcggcctccagactgtcgcttggggttgcttgggcgggtacttgaggcttatcggtcattggcttggctcactcatagacggacctgtccttcgtatacacgcgaggccggcccggtcatcaacaccgggtggccagggcctgcccactcgatggacaagcgcccaccaggcaggtcgatcaacaggggcgaatccatccatccctggctgatcgcggccacggcagcggcgcaagcaccggtgccgcaggcctgggtttcgccggcgccgcgttcccacacacgcaattgtgcacgggaacggtcgatcacctgcaggaagcccacgttcacccgtgccggaaagcgcgggtgatgctcgatcttcggccccagttcatgcaccggggcgttattgatgtcgttgacgcgcagcacggcgtgggggttgcccatggacacggcggccaggtcaacgatcttgccatcgacgtcgaccgcgtagctggtcgcctgctcggtggcctgaaacggaatgtccgccggcaccaggcgtggcgcgcccatattgacgctgatctggccgtcgctgcggatgtccagctcgatcacaccgctcttggtctcgacgcgaatctgccgcttggcggtcaggcgcttgtccagcacaaagcgggcgaagcagcgcgcgccgttgccgcactgttccacttcggagccgtcggaattgaagatccggtaacggaaatccacctccgggttgctcggcgcctcgacgatcagcagttggtcaaaaccaataccggtatggcggtcgccccattgtttagcgtgtttgggcaggatatgcgcgtgctggctgacaaggtccaggaccataaagtcattgcccagcccgtgcatcttggtaaaacgcagcagcatggcttactccggcagcaggctttcgccagcatacaactcggctaccgtctcgcggcgacgcacttcaaacgcttgatcaccgtccaccagcagctcggcggcacggccgcgagtgttgtagttggaactcatgacaaacccgtaggcaccggccgaatggatggccagcaggtcgccttcttccagggccagctgacggtccttggccaggaagtcgccggtctcgcagatcgggccgacgatgtcataagcgcgcgcttcgctgttgcgaggcgtcacggcggtgacattcatccaggcctggtacagcgccgggcggatcaggtcgttcatcgccgcgtcgacgatggcgaaatccttgtgctcggtgtgcttgaggtactcgacttgggtcagcagcacgccgccgttggcaacgatgtaacggcctggctcgaacatcagggtcaggtcgcggccttcaatgcgctcgcgtactgctttgatgtagtcggcgatcagcggcggctcttcgtcgcgatagcgcacgcccacgccgccaccgaggtcgatgtggtgcaggtagatgccgcattcgccgagacgatcgatcaacgccagcaggcggtcgagggcgtcgaggaacggtggcaacgtcgtcagttgcgagccgatatggcagtccacgcccagcacttccaggttcggcagttgggcggcgcggatgtacacgtcctcggcgtcggcaatggcgatgccgaacttgttctctttgagaccggtggagatgtaggggtgcgtaccggcatcgacgtccgggttgacgcgcagggaaatcggcgcgcgaacgcccatctcggcggccacaacctgcaggcgctccagctcgtcggtggattcgatgttgaagcaatgcacgccgacttccagggcacggcgcatgtcttcgcgggtcttgccgacgccggagaacacgatcttgtcagccttgccgccggcagccagcacacgttccagctcgccacgggagacgatgtcgaaaccggcgcccaggcgcgccaggacactcagtacacccaggttggagttggccttgaccgcgtagcacaccaggtgcggcacgccgtccagcgagtcggtgaaagaacggtattgggcttcgatatgcgcacgggagtacacataggtcggggtgccaaagcgctcggcaatcgcggacaacgccacgccttccgcgaacagctcgccgtcccggtagttaaaagcgtccatggttttcccttagtaggtgtcgtgcttatgcgctttggatggcttttgcgacgattgcgcctggtcattcgggtctttgctgtcatctggcaggtacagcgggcctttttgaccacaggcactaacgaggcaagcgaccgcgacgagcgcagcaagggaagagatcaggcgcttcatggcgaaatccttgaatatgcattaattgcgcccgagtataccgaccacccgccagcttgcctatgcgctggaatacccgtccggcgggggtttgccgagatagtagggaagcaggctacgatggctgaggaattttcatgcagcccgtgcagatgaaatcggtatcctttgcaatcggcgaagcgcgtccgtatcgtgcggcgcttgagcaaaaccagacacttttgaggttgccacaatgagtttgaccgaagcccgttttcacgacctggtggattcgacccagcaggcactggaagatattttcgatgacagcggcctggacgtggacctggaaaactcggccggcgtactgaccgtcaagttcgacaacggcacccaattgatcttcagtcgccaagagcctttgcgtcagctgtggctggctgcacgttccggtggcattcatttcgatttcgacgaagaaagcggcaagtggcaatgcgacaaaagcgaagagttgttgggtgaaatcctcgcgcgcctcgtcaatgaacaggccggcgccgagctggacttcgacgagatctgaccgtgacccagcctgcacccgtccgcccgcccaagccgttgttcagcaatgtcagcccggcggtgccgtcaccttgtatcagtttgtgtcgcctggacgagcaaaaagtctgcctcggctgtttccgtcacgtggaagacatccgtgagtggcgctctgccgacgatgcccggcgccgggtgatctgtgccgaggccgagcagcgcagggagcgcgcctgaggtcgtcttgtttatttgtgacgctgtggtagtgtccggtgacgcctcaactcatcgaggcccgtgagaaccccgcctttttctggcggggttttgcttttttgtgcagaaaaaaggagtctgcctgaatcatgagcaccgcaccttccatcatcctcacccgtcttgacgtgcagcgcctggagcaactgatcgaccgtttgggcgacgagtttcctggcgtcgaagcgttgcaagccgaactcgaccgcgctgaagacgtggtcggccacgatgaagtgcccgggggtgtcgtgaccatgaactccagcgtgcactgccgtgaacaaggcagtggcaaggactaccacctgaccctggtctacccgaaagacgcgaatgccgacgaaggcaggatttcaattctggcacccgtaggcagcgccttgcttggcctgcaagtgggccagcacattgactggccggcaccgggcggcaagacactcaagctggaattgctcagtgttgaagggcagcccaaagacggtggtgcattcttcttgtaaaaagcgccgctctaaatctggctcagcgcttcattgagcgaaagttccagttcagccttgtagcgcaaatacagattgctcgggctttgcacatcaccgagcaggccggacaggtccaggtcggtgatgtagcagcggtagcgctcggtttcccggcgttgcccgacgatttcctgggcgaccacggcaaacagctggtcgccaaactccagctcggaaaactctcgctgattgcagtacagggtaatgcccacctggcccggtgcggccttgccgataatcgcctgcacatcataaaacgccttgttggtggggttctgcggtgccggccgcggttcgatgccgcgcgcgcgcaagctgcctgacggcaacagttggtaatacagaatttgcacttcgcccaaaggttgctgtgaatccagaggcgacaacgcttcccggcggtagaggatcgactgcaggaagcgctgcaggggggcaagcaggctctgctcatcatggaaaggcaagcgctgttgccagagcgcgttgaactcatccagcacgtacagttcggcgacgccttcgttgacccgatagaacacctgcacacagtcggccaggcccatgggcagcagcagcgccaggtcgtggtcttccagcgccctggcgtccaggtgcagcgggctataggccgccaattcctcgctgaggtaggcgatcagcgcgtcctgggtcggcaatgacacgtggttggcttggcccggtatcagttccatcacgtggtaatgctgctgaacctggagcagatagcgatgattaccctggccgagcagcaggttttgcgcggtatcgaaaacttcctccacgcgttgtgcaatgaactgcgcacggttgtgacagaagcagcgcacccgcagccggggcaaatgatccgacggcagttggttgaggtagtcgcgcaggcaatcgagcagcgcgtgggggccgtcgtagcggctgaccatcacctcgttccagctgttgagcgtgacctgatccagcgtcagtaccaggttatcgcgcaccccggcataactcagggagtcggtgcgctcggtggtcatcaggatgttcaggtcgcgatgatgcttgagcgggtcgacgccgacgttgatcagcaacaacacctcttccggtaccgccgagcgcagcaggcggtcttcatccacgctggccaggggcagggtgatggtctgttgcaggctgcccagcaggttgaacagctcgaattcggtcatgtcgctgacgcccgggtgcagcgccaggcgtgtgctgctgtcgatcacgccgttgcggtggcaccaggtgagcatttccagcaggtcgcggctgcgcttgatcggcgcaaaatgttcccattccagcgccgtgaggttgccgttgtacaagccccaatggtgctggcccggctccttgcggttgggcgattgtaccagcgtcagggtgtcttcggccaagtcaggcgcgatgccggggttgatgaactcgaccttgccggccttgcgttcgaaggctgcatacagccggcggcccaatacattcaggtcgcgcttgttgatcaggctgacggtctgctcggtgcgggcgaactgggtcaaaaaccgatagctgtagttcagctcattgaccaacgcgcggcgctccgaggcgacctggcgcactttccactggctgcgactgtccagcaaggccagttggcgctggtcccagccccactcacgggccaggcgttcgagcagcaaccgctgccaactggtggtgcgctggcctgcactgagcttgcggttgaccttcaaatacaggctgcggcgcaccagttccaggcgttccggctcgttgcgggccttgaggtattcctcgattcggcggtagaccacgatgtacgggtccaactcatccaggtccatctgattggcgaacaccgcgcgcttgaagcgcaggctcaggcaatgcacgttcgggtgttcgctggcgtagacctcggtcagcagcagcttgagcacggatttgtagggcgattcaatgcccttgaacagttgccacagcccggcgccaatgaactcccctggcggaatatgggccagatggccgagatcgagggtttcatcggcgcggataaaacgcttgaagatcagcgcgtgggtgaactcggcgtagcgggtctcttcatagaccggcaccagccaccagatcggcgtgcgcccggccagccagatggcggtgcggtagaactcgtccagcaacaggtagtgctgagtggtaccgcaatcgtcggagctcagttgtgtgtcacgttcgcccagtacaaagcgcgcagggtcaatcaggaaaaagtgcgcctcggcgcccatggtctgggcccagacttccagcaactggcatttcttgcgcagctcggccagttctgtctcgctcaggtcgggcgcgtggcatacccatacgtccatgtcgctttggtccgcctgagcgagggtgccgaggctgcccatcaaaaacaggccatggatcggccggggcgggttgccgtgacgcggcttgtaggaaaacgagcgggtcagtcgctgggcttcggtcagggtttgggcgtcgggttcgaaattcgatagcccggccggcgtgctgcccgatacatagccaggcaacagcgggtggttgacgtgaaaaaacagcggcaacagggtcaacacgctttgctggcgcggcgtcagcccctcgacagcccgagccatgcgcccctcgttgagggccatgaagcgcgcgcgcagctgggccagcaccttgcggtcgatgccttcgtccaggtcggggcggatttcatgggtgcgggtcatgtcgaactcggtggctcgcagggcccgacgtgggcggccgtgtaggagtttacagacactagcgtaggaggtttagagggaaatggtttttggcgtcagaattttgggcaatgcacagcaacgccctcggaatccgcaagaggcggactccatgggcggtatcagatctcaggcagcttctttggtggtggcagtggtcaagatggtcagcagggtttgggcctgctctgcagcgtcacgaccgaggctggtcagatagcctccgtccggctggtcgataagccctttcgtgtgaaggcgtttggcggcggcgatggcagtaggagcggcggtctggtggactttcagaccttctttggtgctgtccaaggggaagagtacaaggatttccagttcggcaaccaactcaggggtatacgacataaggactccagactttctaagaatttattagaggctagcagggcataaggtgaacgcactttgccgaactgtccagccggttgtgggcactggcttgcctgcgatgctggcgactcggtttaacggttgcacagaggtgatgccatcgcaggtgagccagctcccacagggatcagcaccgcctggaattttgggtgctattggttctctggcggcaattcgggcagggcccgcagcgctgtttcgtaccattgggtatcgaatgcgcggtcttcttcgagcattttgtcgatttcgacagcgagcacgtgggccatcaggttgaggatgtcatcccgctcgtagcccaccagggtcagcttgttgaaggtggctttggcggcagccgggttatcgctttcgatctggttttcgatggcctgggtcagcgtgctttcggtgaattcttcttcgtcgttgtcgatatcggtcggctcgctcatggcaggctcctcaaggaaaggctgccagtttacgcccattcaggtgactgatgctgctggtcaggccgtgccttcggatctataactcttgcagccaaccccacacccggcctggaggcatttgtgatgctcaagctttacggattttcggtcagcaactactacaacatggtcaaactggcgctgctggagaaagggctgccatttgaagaggtgccgttttatgcaggccagacccctgaagcccttgccgtgagccctcggggcaaagtgccggttctgggcgtcaaacagggttttatcaatgaaaccagcgtaatcctcgaataccttgagcaaacccaggaaggcccggcgctgctgcccggcgagccattccagcgcgcccaggtgctggcgctgtgccgggaaatcgagctgtacatcgaattgcccgcgcgcgcgtgcttcgccgaagcgtttttcggtatgccggtgccggaggcgatcaaggagaaatccagagcggagttgctgctgggggtcggttctttaggcaggcacggcaagttcgcgccctatgtggcgggggagagcttcacgattgcggatgtgtatttcatgtacagcgtgaacctcgcctgtgcggtgggcgagaagctgtttgggctggatttgctggcagagttgccggcggccaaggccttgctggagaagctgcatgcaatgcccagcgcgcagaaggtggcagcggacagggaggcggcaatgccggcgtttatggcgatgatagcggcgaagaaatagattctcggggcctgtgagagcgctatcgcgggcaagcccagctcccacacttgaccgcgttccaggcttggaatgcactcaaatgtgggcgctggcttgcctgcgatgcttttagcggctggcgagcaatgcctggccgcgcacaacggctgccttcacctgcgctggcgcagtcccgccgatgtggttacgggcattcaccgaaccttccagggtcagcacggcaaacacgtcctgttcgatctggtcgctgaactggcgcagttcttccaggctcatttctgccaggtctttgccggtgtccacgccgtatttcaccgcgtggccaacgatctcgtggcagtcacggaacggcaggccacgacgcaccaggtagtccgccaggtcagtcgcggtggagaacccgcgcagcgccgcttcacgcatgatcgcgtgcttgggcttgatcgccgggatcatgtcggcaaacgcgcgcagcgagtcgcgcagggtgtcggcggcgtcgaacagcggctccttgtcttcctgattgtccttgttgtaggccagaggctggcctttcatcagggtcaacaggcccatcagtgcgccgaatacacggccacttttgccacgaaccagttccggtacgtcggggtttttcttttgcggcatgatcgagctgccggtgcagaagcggtccggcaggtcgatgaactggaattgcgcgctggtccacaacaccagctcttcggagaaacgcgacaggtgcatcatcgcgatgctggcggcggcgcagaactcgatggcgaagtcacggtccgacacgccgtccagggagttgccgcccacggcatcaaaacccagcaattgcgcggtgtattcgcggtcgatcgggtaggtggtgccggccagcgcggcactgcccagcggcatgcggttggcgcgcttgcggcaatccaccaggcgctcgtagtcacggctgagcatttcgaaccaggccagcaggtggtggccaaacgtcacaggctgtgcagtttgcaggtgggtaaagccgggcatgattgtgcccgactcacgctcggcctgctccagcagccctttttgcaagcgggtgatttcgcccaggatcaggtcgatttcatcgcgcagccacaggcggatatcggtggccacctggtcgttacggctgcggccggtgtgcagcttcttgccggtcacgccgatacggtcggtgagacgagcctcgatattcatgtgcacgtcttccagatcgacgcgccagtcgaaggtgccggcttcgatctcgccacggatggtggtcaggccgtcgatgatgctgtcgcgctcggcgtcagtcagtacgccgactttcgccagcatcgtggcgtgggcgatcgagcccatgatgtcgtggcggtacaggcgctggtcgaaggtgacggaggcggtgaagcgggcgacgaaggcgtcgacgggttcactgaagcggccgccccaggactggttggtcttgtcggtgctcatggattcgctcgtgatctgcttaaaagaggcgtggaggtgtgccgccgataataacagggttgcccgtggaggcggtgctgcgggtggtcggcatttttatttgcgcaaaggatggctaagtgccttgccgccgaccgcgtccgggacgagactgcaataaggtgcttattgatgcgatattttacgaatgagcaatatcgtctcgccgagcgtctacagttggactgatagtgtgtgaatgcaccaaagtcgggtgatgcggtcatagcccagactatccattaaaaaaggggggtattcggattgtgtatcagcaaaccctacaacgatgcgcgaaggctgcaggtcttgggcgttattgaacaggtccgggtaaatttgggtgccgctctcggggcactttttgccgctcgcgctagtcttagcgtggatcgctgtgacgtaagtcaccgcacctgtctacgctatccttgtgcgagactcacgcaggaatccagcgcaatatgaatgtcctgatcgttgatgacgaaccccaagcccgcgagcgactgagccgtttggtcagtgagcttgagggctataaagtccttgaaccgagcgccaccacgggcgaagaggcgttgacgctgatcgacagcctcaagccggatgtggtgttgcttgatattcgcctgccgggcctggatggcctgcaagtcgctgcccgcctgagcgagcgcgaatcaccacctgccgtggtgttatgcgcagcggcggatgagtttcccgagcagacgctgcaagacagcggtgttgcctacctgctcaagccggcgacgggtgaggcattgctcaaggccttgaaaaaggccgagcgccccaaccgcgtccagctcgccgccctgacccagcccgccgcccaaagtggcaacgggccgcgcagccatatcagcgcgcggacccgcaaaggcattgagctgattccgctgagccaggtggtctacttcattgccgaccacaaatacgtgaccctgcgccacgaggccggcgaagtgctgctcgatgagccgctcaaggccctggaagatgagtttggtgaccgtttcgtgcgtatccaccgcaacgcgctggtggcccgggagcgaatagaacgcctgcaacgcacgcccctggggcactttcagctatttttgaaagggcttaacggcgacgcattgatcgtcagtcggcgccatgtcgccggcgtgcgcaagatgatgcagcagctttagcccgagggctgtggtgtggcgtgtatcccaatcccggtgcgacgtggccagggaggccccgcacttgctgattcaaatcaaagcgtgtttgcctgagctgttattatctgccgtatctattcagtacggattgatccatgtcctctcgcgaaatccgcatcgccacccgtaaaagcgccctggccttgtggcaggccgaatacgtcaaagcacgcctcgagcaggcccatccgggcctcaaggtttcattggtgcccatggtcagtcgcggcgacaagctgctcgactcgccgctgtcgaagatcggcggcaagggtttgttcgtcaaggaactggaaaccgcgctgctggaaaacgaagccgacatcgccgtgcactcgatgaaagacgtgccgatggacttcccgcaaggcctgggcctgtattgcatctgtgagcgcgaagaccctcgcgacgcctttgtttccaacacctttgcatccctggatgaattgcctctgggcagcatcgtcggcacgtccagcctgcgccgtcaggcgcagttgctgactcgacgcccggacctgcagattcgttttctgcgcggtaacgtcaatacccgtctggccaagttggatgccggtgaatatgacgcaatcattctcgcggcggctggcttgattcgcctgggctttgaagaccgtatcacctcggcgatcagcgtcgaagacagcttgcccgcaggcgggcagggcgcagtcggcattgaatgccgcaccgccgacagcgaaatccacgccttgctcaagcctctggaccacgctgacaccgaagtccgcgttacggccgagcgcgcccttaacaaacacctcaacggtggctgccaggtgccgattgcctgttacgccgtgctcgaaggcgaaaacctttggctgcgtggcctggtgggtgatcctgaaggcggcacgctgctcactgccgaggttcgcgggccacagcgtgacgccacggccctgggcatacaggtagcggaagagctgctggaaaaaggcgccggtgccatcctgcagaaagtctatggcgaggcggggccgcagtgaccccatggcgcgtgctgctgacgcggcctgccgaggagtcgatggcccttgcggcgtcgttggccgaagcgggcatcttcagcagcagcctgcccttgctggacatcgaaccgctccccgtcacacctgaacagcaagctgttttccgtgacctgggccgttactgtgcggtgattgtcgtcagcaaacctgcggcgcgccttgccgtggcgcagctcgagcgagcatggcggcagttgccgtggttcagtgtcggcgcagccaccgcgcaggtgctggccgaacatggcctggaggttaagaatccccctactggcgacgacagcgaggccttgcttcaattgcctgcgttgcgcgaggctatcgcccgcccggatgcccgggtactgatcctgcgtggcgagggcggtcgggaactgctggcggagcgcttgcgtgaacaaggtgctagtgtcgactatctggagttgtatcgccgtttcctgccggcttacgccgccggggtgctgatggcgcgcatccagttggaacgcttgaatggcctggtggtcagcagtgggcagggttttttaaacctgcaggccctggccggtgccgattggccccaagtggcgcagctgccgttgttcgtgcccagcccgcgcgtgtatgaaatggcacgcgctgctggcgcagaaaaagttgtggattgtcgcggcgcgagtgccgcggctttgttagtggctttgcgcagttctgccgtgtaaggcaggccgccccactctctgatacgcaaaggacggatacgtgagcgaaacagccttgcctaaagatgaaacccaacccgcacttgatgcgccggttgagtcacaggtagcagcgccacgtcgtggcaatggcctggcaatcgtcgccctgttgctcggcgccgcaggcgttgctgccggcggctgggggatttggcaggtccgcgccctgcaagccagcagccagcagcagctggggcaggtgcagaccctcgatgaccaatctcaagccctcaagcagagccagcaacagttggcggcgcgcctggcgcagttgcccgcagctgatgagctggaggagcgtcgccgtttggttgcccagttgcagggcgatcagcaacgcttgagccagcgcctggaaacggtgttgggcgccagccgccaggactggcgcctggctgaggctgaacatttgatccgcctggccagcttgcggttgtctgccttgcaggacatcaacagcgcgcagtcactggtccagggcgccgacgaaattctccgcgaacaaagcgatccaggtgcctacgccgcccgcgaacaattggccaagagcctcgccgcgctgcgtagcaccgagcaaccggaccgtaccgggctgtatctgcaattggcggccctgcgtgaccaggtcgtgcagcttgccgccattgcgccggaataccagctcaccgagccgggttcccaagggcgcccgaccaccgacacagaaagccgctggagccagtggtgggagcagatttcccgctacttccgcatcgacttcaaccctgacgacaacattcgtccgttgctcgccgggcaaggcctgaaccaggtgcgcctggccctcagcctggccctggagcaggcacaatgggcggcgctcaatggtgaaacggcggtatacagccgctcactgggtgaagcgcgcagcgtgttgcaagacaacttcaacggggacaacccgcagagcaaggccatgctggcgcgtatcgccgagcttgagcccaaggcggtttctgtggtcacgccagacctcgccgccagcctggcggcggtgcaggcctaccttgagcgccgtcatctgtctgctgatgaagccaaggcgtcggcgagcaagccggcaacccaggagtagagctgatgaagcgtttctatgtgatcctggtgctggcaattgcgatcgccctcgcgctggccgtaggtatttcccaacataccggctacgtgctgattacttatcctcacctgctgcattacgaatcgagcctgtgggccacgctggtggcgatatttgccgttggcctggcgatctacctgattcgtgtgctgctgagcctggtcaccacgtccggaggcgtggtcaacccgtggtcgcgacgcaaccgtagccgtcgtgtgcaggttgctatcgagcagggccagatggacctcgccgaaggccgctgggccagtgccgagcgccacttgcatcgcgccgctgaggcggagcgccagccgttgctgtactaccttggcgcggcccgcgcggccaacgagcaaggccgctatgaagagtcggacggtctgttggagcgtgctttggagcgccagccccaggcggaacttgccgtcgcgttgagtcacgcgcaactgcagacggaccgcggcgacacagaaggtgccctggttaccttgcaggccatgcacgagcgtcatccgcataatccgcaggtcttgcgccagttgcagcgcctgcaccagcagcgcggtgattggtcgtcggtgattcgcctgttgcctgagctgcgtaaagacaaagtgcttcctgctacggagcttgccgagctggagcgccgtgcatggggcgaaaatctgggcctggccgctcaacgcgaagagcagggcgaagcggggttgcagtctcttgagcgggcgtgggagcaactgacttccgcgcagcgtcaggagccacaactggtgttggcgtatgcggagcagttgcgccggttgggcgcggatgccaaggcagaggaagtgctgcgtggcgctatcaaacgtggctacgacagccatctgatccggctgtatggtttgttgcgcggcagcgacccagcccggcagttgaaatttgccgaaggctggctcaaggagcattcggctgacgccagcctgctgctgacccttggccgcctttgcctgcaaaacagtttgtggggtaaagcgcgggattatctggaaagcagcctgcaggtacagcgcaatcctgaggcctgtgccgagttggcgcgcctgctggcccagttgggtgacaccgagcgcagcaatcagttgttccaggaaggtctgggcctgctggacagccgcttgctggcttcgccgttacccgtgcctgcgcgggtttgatgtaggaaaaagaagcaagttggcccgggcatttctgagggccaacccttcatcacgcactgaatgccggggtctaaagcgccaggcagcaaattcctacctttggatgctccaagtcatccaggttctgacggtatatctctatgctctcgcggaattgtccgcgtcggtgcgtattgaaaggggtcgggcctttcctctaccgtaacggcctgtctcttgcggtacggataaaaatgtctttggccccttcacgttccctgtttctcctggcgttcatggctggtgcgctgacgttgggtgcctctttttatcttgaatatgcggcgctgctacgcccttgttttctgtgccaggtacaacgcgtctatttggcggtgttctcgttgatcaacctgatcgcggcgattcatggcacgaagcgcgccttggcctacgtctacgggttggcgagcatggggtgtgcattgctcggcgccatcactgcagtgcgtcaggtgctgctacaaaatgccaccccggagcaggctacgaactgctggccgagcctgcagtacatggttgaaaacctgtcgttttggcaagcgctgcaatcgaccgtcgaaggcaccgtcgattgcgttgaaatcaactggaccctatttgatttgagccttccagagtggagcctgctgttctttctggggatgttgatcctgggcatcatgcagttttcacagtcattatcgcgccacagattccagctcgtggagcgctgaaaacacgccatggtttgtaggacgggattaaacacttgtatgaactttctctcctgcgtaccttgaagccatagtcatgcgggcataatctggcccgcacgcgttattgaaaccgtttgccagatgcggctttgtccgcctgccgttttacccctgaagtatcaagcgggcacagggcggcagcgcccctatagggaagagagatcatcatgctggaaagttgtcagaatgctcaggaacgctggggtggggtgcacaagctgatcgacagctggctcaaagcacgtcacgaactggttcgggcctttgatgctctcggcgccaagcccgaggcattggctcagaatcgcgaaccgttgcaggacttctgtggggtgttggtggactacgtgtctgccggccatttcggtgtctacgagcagttgaccaaagaggcgcaagcctttgacgatcagcgtggtctggacttggccgaaaccatttacccgcgcattgatgtcatcactgaaaagctgctggcgttcactgacctgtgtgacgccggaaactgtgttgcagaaaaattcaaagagttgggtgcactgcttcacgaacgcttcgagctggaagactgcttgatcgaagtgctgcacaacgcccacaaggaagagtccgctacccaggcgtgacgcttgcctgtgagataaaaaaacggtgcgcatggcgcaccgttttttattggcttattggcgaacaccgagcaattcgatctcgaagaccagcggcgtatacggcgggatcaattcgcccgcgccgtcagcgccataggcttgggccgatggaatcaccaagcgccatttcgcgcctgtcggcatttgttgcagtgcgctgctccagccactgatcacgctgtcgaggcgaaaccactgcggttgggtgcttttgtcgaagacggtcccatcgggcaagcgccccacgtatttgacctgcacttcgtcactggccaacggcttgctgccagtgccgggcgacagctcggtgagcaggatgccatcggctaattcgcgcacgccgctcgtggctttttccttgttcaagaactgctgttcggcagccaatgctttttcgcttcgcggggtttgggcgtctgacgcgctctgtgcttcatgctgtgcaagaatctgctcgatgcgtgcgttgtccagcgccagcggtttgccttgataggcctgcttcaggccgtcgagcagcgcctggatctgcaggtcggggacttcctgatgcaagcgctcacccaggcttgcccccaggctgtaggcgaggtcgtgctgctcttgctcagtggttttggacggcgcttgctcgcccgcattggccactgaaattgccaggccaagcacaaaaaaaagataacgcgacatggacattctcccggcgaaagtgcgacggattatgccagcgtgaacgctgaaaaagtggcatggtttttcgttatatcgataagaattttctcccggtgcaacgcaaggcaaacgatactgtcaacatgccctagcggcggtaagagcagagggctagtatgagccgcacccacgtcagccaggaggtaaaccatgtcggccaaacagaagcctgttaataccccgttgcatttactccaacaactttcgggcagcttgctcgaacatctggaaagcgcttgttcccaagccctggccgatgcagaaaagctgctcgccaagctggaaaagcagcgcggtaaagcgcaagaaaagctgcacaaatcccgcaccaaactgcaagacgccgccaccgccggcaaggccaaggctcaagccaaagccaaagacgcagtcaaagaacttgaggacctgctggacgccctcaaggatcgccaagctgaaacccgcacctacatttcccaactcaaaaaagatgctcaagaaagcctgaaactggcccagggcgttggtcgtgtgaaggaagccgtcgctaaagtgctgggcactcgtgctccggcaaaagcggctgcagcgagcgcggcgaaaaagccggcgagcaaagctgttgctgccaaggcacctgctaaagctgctgctaagccagccgctaaaaccgctgctgcaaaaccagccgcgaagccaactgccaaaaccgctgctgcaaaaccagccgcgaagccagctgccaaaactgctgctgcaaaaccggctgctaagccagccgctaaaaccgctgctgcaaaaccggccgcgaagccagctgccaaaactgctgctgcaaaaccggctgcgaagcctgccgctaaaactgctgctgcgaaaccagctgccaagccagccgctaaaaccgctgctgcaaaaccggccgcgaagccagctgccaaacctgccgctgcgaaaccagctgccaaaccagccgctaaaaccgctgctgcaaaaccagccgcgaagccagctgccaaacctgctgctgcgaaacccgctgccaagccagccgctaaaaccgctgctgcaaaaccagccgcgaagccagctgccaaacctgctgctgcgaaacccgctgccaagccggccgctaaacctgctgctgcgaaacccgctgccaagccggccgctaaacctgctgctgcgaaacccgctgccaagccagtcgctaaacctgctgctgcgaaacccgctgccaagccggccgctaaaccggctgctgcaaaaccagctgccaagccagccaccccggcagcaccggccgctaccccggcagcgtccaccgctcccaccgcaccggcaagcagcacgcctgcaccggtagcgccaagcaccaccccaaccagcgcttcctaagtgccggtggccacggcgcgcagcagttgcagcgcgccgtggtcgaggttggcggctccggccgccaagccttcaagccatctgtgttggcccgcctgcgtcggccaagcctgtgccagcgtctccagacgcttcaacaactgccgttcggcctccagttccaggcctttgacccgctcgcgtaaccccgccaattgctcatcctgtttcgccatagcccgccattgcacgcgcacctggcgcaacggttcgatcacctgcgcctgccacggctcggcgatttgcttgagcgcctgtatacggtcggctgtcagcaccacgccacgctgttccagccaggccccgcagagcaacaggcacacatccgcgccttgttcctgcaagcgcaagcaagcggcttcaacgcccgggcgggcgtaagtcgaaagggcaaagctccacaggtcagcgcacatattcacacccaagccagcggccaacgaagctggtagactccgccgccattatgatccgacttcaaagcctaacattacagcgtggcccgcaacgtcttcttgaagacgccgagctgaccctgcacgccggtcacaaagccggcctgatcggtgccaatggcgccggcaaatccacgttgttcgccttgttgctgggtgagctgaccccggattccggagactgcttgttgccggccgactggcgcatcgcccatatgcgccaggagatcgacaccctggaccgcattgcgatcgactacgtgctcgatggcgacctgcgtctgcgccaggtgcaacacgacctcgccgaggccgagaaagcccaggatggcgccgcccaggcccgcctgcactcggaactcgacagtgccgacggctacaccgccgacgcccgcgcccgcaagatgctcgccggccttggcttcaccaacgagcagatggaccgcccggtcgccgacttctccggtggctggcgcatgcgcttgaacctggcgcaggcgctgatgtgcccgtctgacctgttgctgctcgacgaaccgaccaaccacctggacctcgatgcgatcctgtggctggaagattttctcaagagctacccgggcactctgctgctgatttcccacgaccgggatttcctcgacgccgtggtcgacaacattgcccacgtcgaacagaaaaaaatcacgctctaccgtggcggctacaccgcgttcgaacgcgcccgcgccgagcggctagcgcagcaacaacaggcgttcgagaagcagcaggcgcagcgcgcgcacatggaaagctacatcgcccgcttcaaggcccaggccaccaaggcccgtcaggcccagagccggatcaaggcgctggagcgcatggaagagttgtcggcggcccatgtcgattcgccgttcgattttgtgttccgcgagtcggtgaagatttccagcccgttgctcgacctctcggatgcccgcctgggttatggcgagaaaaccatcctggagaaggtcaagctgcagctcacgccgggcgcgcgtatcggtttgctcggccccaatggtgcgggcaagtcgacgctgatcaagaacctgtcgggtgaattgcaaccgttggccggccgcctgacccgtggcgagaacctggtggtgggctactttgcccagcatcagttggactcgctcgacgccaaggccagcccgttgctgcacctgcaacgccttgcgccgaccgagcgcgagcagaccttgcgcgatttcctcggtggcttcgacttccgtggtgcgcgcattgatgagccggtgttgaacttctccggtggcgaaaaagcccgtctggccctggcgttgatcgcctgggaccgcccgaacctgttgctgctcgacgaaccgaccaaccacctggacctggaaatgcgcctggcgctgaccatggcgctgcaggagttcagcggtgcggtgttggtggtgtctcacgatcgccacttgctcaaaagcaccaccgacaacttcctgctggtggctgacggcaaagtcgaagagttcgacggcgacctcgacgactacgcgcgctggctgaccgaataccgcctgcgcaatgcgccggccagcaacacgccggtcaacccggacaagaccgacaagaaggcccagcgtcaggccgccgccgcactgcgccaacagttggcgccgcataaacgcgaagccgacaagctggaagccgagctgggcaaggtgcacgagcgcctggccaagatcgaagccagcctgggtgacagcgcggtgtatgaggcggcgcgcaaggatgagctacgcgacctgctggccgaacaggccaaactcaaggtgcgtgaagggcagttggaggaaacctggatggaggccctcgaactgctcgaaagcctgcaagcggagctggaggcgctgtcctgatggaagcgctgcaactgccgctgccggcgcaatggattgagcctgtgtggatcggcgtgcaaatcctgctgatcctgctggccggctacctcgcccagcgcttcgtcgccaaagggctgacccgcctgggtgagcgctacccgtttccgccgcaactgctgatgccgctgcgcggtggcctgcgttggctgatcatgggcagtgcattgatcttcgtgcttggccgcctgggcgtgtccgccaccgtgttgtggacagcgctgtcggggtttgtcgccgtggccgccgtagcgttctttgccatgtggtcagtgctgtcgaacctgctgtgtgcgattttgatctttacggtcgggccgtttcgcctgggtgacatcgttgaattggtggataccgtcgacaagccgggtgtgaaagggcgggttgttgcaatcaacttgctgtacaccacgctgatcgaagtggcagaagccggcactgacagcgccatggtgcaggtgcccaacagtctgttcttccagcgctcggtgcgacgttggccgggtactcacgtcttcccgggcgaccgctagcatccacctcgagtaaaaatctgtagccagcctttagccggcggagttagctttagccacaaccgctaactttcccctgaggtgtgtaatggcactcgatacgtggctggcctttttcgtggccagttggatcatctccctttcccccggcgccggcgccatcgcttcgatgtccagcggcctgcaatacggtttcctgcgcggttactggaacgccattggcctgcaactgggcctggcgatgcagattgccgtggtggcgggcgggctgggtgccattctggcggcgtcgtctaccgcgttttatgcgatcaaatggttcggcgtggcctacctggtgtacctggccatcaagcaatggcgggccttgccgatggacatggccgatgacgcggcggtgcgcccgatcggcaagccgctggcgatgatgttccggggttttctggtcaacgccagcaaccccaaggcgttggtgttcatgctggcggtgctgccgcagttcgtggacccgcacgcgccgctgctggctcagtatctgatcctgggtgcgacgatgatcagtgtggatatgatcgtgatggcgggttacacggggctggcgtcgaaggtgttgcgtttgttgcgcacgcctaagcagcagaagcgcatgaaccgtacgtttgccgggttgtttgtgggcgctgcgggtttcctggccagcttgcaccgcgcgacggcgtaactgaataaaccgggtcaaaaatgtgggagctggcttgcctgcgatagcggtgtacctgatacaccgctatcgcaggcaagccagcttccacattggttttgtgttgtgtgtgagaagtaagctcagcgcaagatcttcggcgcttcatctcttggcaagttattgcgcaacgcaggcttgcctgggtcttgatacccgccacccaactgttccgccaactgccgggccacatcttcacccaaggctttcgacacttccttcaccacacgcggccggttaaggctcacgcgtacatcgcggttgttcaccagcttggtgtcctggccttcacccatcgcggtaaacgccgaggtgatctcgaaggtgcgggtgttgatcaggctgaaatccgccaccagcgtcaggcccagcacggccgagtagctgttggtgtggtccagggcgttgacgtcctgggtgaagtcgatgtccgacagcgtgccgaacagcacatagtccgcgcccttgaagttaccggccttgatgcgtttgatcacgtcgtagacgtcacccttggcgtcggcggtgtaaggcgtgccctgcaccaactggaactggtgcgacttgaggatctcgcctttgatatcaccgctgaatttacgcagctcggtctgttcgatgtagctggtgcggctctcgtactcgctgtagctcgacgctccgctggcctgataagcgctggcctggaagctattgctggccgacaccgcgtggatgtattcctcgacccgcgcctcataggcgaggtccgtcaccgcgattttcggagcggccgaggcgccaaaggcgcacaacaggccgatcatgccgatccatgcacgcattgttcagcgctccgtggtcttgcggatttctttttcgtccatccattcggccacgccgctttcgacgtcgatcagttgcaggctgaatttgtagaacacgtccttgtagtccgagctgcgcttgacgatggagctgatggagccttccaggcggtacttggcggcgaccatgttgccggtcttgctcacggtggacttcttgtacaggccgctctggttctgcagcttgagctggtcgacctggctttgcatgtcggtgttgtcgctggcaaagcgcgcggtgccagtcttcatcagctgagtcttgatcgatgtggtgatctcgcgggtgtcgatgtactcgctggtcttgttcttaacgtcatacacctgcaccaccgggcggccctgcaagatgccggactgggccagggagcgggtcatgctttcggcaatcatctgcaggtcggtggaaccgaactcgttggtcaccgtttccacggccttggtatcgccgtagctgatgttcttgctgcccagtacgggcgaggtgttggagcagccgctggccagcagggcaacgacggcgagaatcgagaagcgtgcaaacatggggaaatctctcagcagcaaaaagggtgaacggctcaaggggtcttaacttcaaggcggaagtcggcagcctggggcaggttggcgatggccggcaggaaggtcgcctggttggcgtacaggttcagcactttccaggtgtcttcatcgcctaccgggaagccatcggcgcccagccaggcgaagcggtagtacatcgtctggttgctgctggtgatgttgctcaattgcaccttggcggtgaggaagccattttcccgggcaacgcgaatggcgccgacggcaatgcccttgaacttgcccatcaccacgattttgctggccgcgctgccaggctccggcggtggcggggtggcgcaaccggcgagcaggacgagcgccagggcgccgaagatgaaatgacgcatagcgtgctccttaaggttgtttgagggcgatggcctggcgtgcagtgctcggcgccacatgggcagcaaggccgccggcgaagacctggttgccgaccacgcgcaaggtgatcacttggtagcgctggtcagccttgacggtcaccagcgtgccgcccagtgcgttgggcaggctgacctgatggtcgccatgcttgaggcgcagacgggtcacttgggtcatgtccggcagggtgcgccaggtgcgagtgtcggcgccctcggtcacggccgaagcgatgcccagcaccaggccggccatggggttggtcttgttcagattgttttgcgtgatgccacggctgacggctcgtacagtagtgcgcaggatgatccctggcatgtcgtcacgcagggcgcgccgggacatggcggtggtgctgttgagcgcggtgaggttctgctgcttcccgtcgacgccgatctgcgcgaaaggcgcggtagagttgtcggctttaatcaccgggaacgacagcggggtgatcaccaggtgcccgtcgatcggaatcggcagcggcaggcgaatcgaatcgcgcgccggcgccaggccactttggaccacgatcagcacgtcggtttcatcggcgccgacctgggatttgtccaggtccagcagggcttgttccagcagcggcgtgttggggcgtaactcggcagccttgcggtagcccggtgctgccaggtctttttcacccagggcctcgtagacgaagcctgccaggtaatggctgaacgcactctggtagctgtttttcaggccgaccacttccggcgcatccagcgcttctatcggatagccgcgcaggtctttgatctgggtggtgacgccctggcgctcggcttcgttctcgcgcttgaggtattccttgtcgcgcaggtcggcgatcaccgcttcgcgttcgtgggtctttttgatctcggtgcgcgcgccgtcgaagtcattcagggccagcaggttcaaggccatttgggtggtcagcatgactttttcgtagtcatagccttcgtagcgacgcactttgtcgttgaccaggaagctgccgaattgggagaggtacttttcgctgtcgaacttgaccgattcctcccacttgaacacttgcaggtcggcgctgcgccacgcggtctggctgccggtgaggtcacctttggcgcgcagcaattcacctttttcgaagaaatacagcaggtctttgtcttcgccggtgttgttcttttccagcagcgtcagggcgccgtcgacattgccggttgccagctgctggttggtggcctgcaactcggtgtcgtagctgcgaaacatcgagcaaccggaaagcaaggtaaccgccacgagcgcgagcggaggtaaggcgttaaatgccatgcagacttcttccctgaaagtatccaactgatgtgtttaatcctcataaaaacgaggatttaaattccctttcgcactaacagggcgcggcattataagcgccattgctggcaaaacaatggctttgtgcctcgacgtagtcgacaaaagcgccatcaccccgtttgtaaaaatgccctcatctgccgaacaccaaatcactaacgccttgagtcaaaccctttaaggtttgacaatgtgttacttcgtatttccctttgagattcattcatgattgcgcctttccgttttctcgcttggctgatgttgccggcgctgatgtcgtgcagtttcaatctgctggccgcgacggccgagggcgccccccaggccctgcatttgctggactacattggtgctgactaccctcccacagtggaagcgggcgcggttgtcgacgagtccgaataccgagaacaagtggagtttctcggggtattgcgcggcttggtggcagacctgccgcaaagggcggagcacgccgagttggtcaagggcgtcgacgaattgtcagccgccgtaaacgcgcgtcaggacggcaccgcagtcgcccgtcaggcgcggcagctgggcgccaagctggcggtggcgtatgaggtcagccaagctccggcgatcacgcctgaccccacccgcggcgcgccgctttacgtccagcagtgctcggtgtgccacggcgccaccggtgccggcgatggcccggcgagtgtgggcatgacgccgccgccggccaacctgcgcgacgccacgcggcttgaccgcctgagcctctacgcgatctacaataccctcggtctgggcgttgaaggcaccgacatgccgtcctttgccgaccaactggacgaccgccagcgctgggacctggcgacctacattgccggtttcactgccgatcccgctgccgccaaaagcgagcaaccgttcaacctcgccgacctggcgcgccaaaccccgaatgaagtactggccgccagcggcccggctgcggctgccacgttccgcgctcaacgcgcgcagccgccgcaggtcaagcgcggcccggcgcagttgctcgactacaccgccaccacgctggacaagagcctggccgccttccgcaacggtgaccacgaacaggcctatgacctgtcggtagccgcctacctggaaggcttcgagctggtggaaagctccctggacaacgtcgacgccaacgtgcgcaaagacaccgaaaaagccctgatggcgtaccggcagtcgttgcaggatggtttgccgatcgagcaggtacagcagcgcctggacgtggccaagggcaagctcaccgaatccgccggcttgctgggcagcgacggcttgagctggtcgctgagctacatctcgggtttgctgattctgttgcgcgaaggcctggaagccattctggtactggcagcgatcctcgctttcctgcgcaacactggccagcagtcggcggtgcgcagcgtgaacgtcggctggggccttgcactgctggccggcttgggtacgtgggccttggcggcgtatgtgattgacgtcagcggcgcccagcgtgaattgctggaaggctgcacggcgctgttcgccagcgtgatggtgctgtggctgggcgtgtggatgcacgaccgccgccacgcggcagcgtggcaggattacatcaagagcagcctggtgggcggcggcgggcgctttggctttgcgatgctggcgttcttttcggtctaccgcgagctgttcgaggtgatcctgttttacgaaaccctgtggctgcaagccggcccggccgggcacaacgcggtgctggcagggggcgccacggcgctggtgctgctggtggggttggcctgggtgattctgcgcggttcggcgaaactgccgctggcgttgttcttcggtatcaacgcggcgctgctgtgcgcgctgtcggtggtgttcgccgggcatggtgtgaaagcactgcaggaagccggtattttcggcacacggccagtggcgttctttgactttgactggctgggcatccacgccgatgcctactcgctgagtgcgcaggccgtggcgatcctggcgattgtggtgctgtatggccgcagccggttggccgagaagcgccgcgccactgcttaagtcttaagtgggcacagttagtgtgggagcgggcttgcccgcgattgcggtgtttcagttgatgtaggtgttggctgatccggcgctatcgcgggcaagcccgctcccacattttgaattgtgctgtggatatgaggagtgtttatgcgcgtatggatcgatgccgatgcctgtccaagggccgccaaggatcaagtcgtcaagttcgcgctcaagcgccagttcgaggtggtgctggtggccggtcagagccagatcaagccgagcttcgcctgcgtaaagctgatcgtggtacccagcgggccggacgcggccgatgattatctggtcgagcatgcggtacccggtgagttggtgatctgcagcgacgtacccttggccgaccggctggtgaagaagggcgtgacggccctggacccgcgcggcaaggagttcagcccggcgaacatgagcgagcggttggcggtgcgtaacctgttcacggatctgcgcgagcagggccagatgggcggcggcccgccgccccatggggaaaaggacaagcaggcgtttgccaatgccctggaccggatcctcacccggttgatgcgccaagcctgacccgtgcccgctcactacaggtcgttttcgtgggtcagctccagcacacgatccaccagcttgttgatgcctgatgccacctcgctgatgcgcttgcccaccatgtaggcgggtgtgctcaccagcttgcgtgccttgtcctcgacgatctcttccaccgtgcactcatggtgggtggcgcccatcttgtccagggctgccgccgtgtcggggcagttgccgatggtgcaggtcacacccgggccgtagatcttcgcggccagcgccggcgagatgcagatcagccccactggcttgcccgcttcggcaaaggcttcggccagttccagaacctgtgggttgacggtgcagccggcgccttccacggcaaagttcgacaggttcttcgccgcgccaaacccgccgggcacgatcagcgcgtcgaactcgtcggcattggcttcgcgaatgtctttgacctcaccccgggcgatacgcgccgattccaccagcacattgcgtgactcgggcatttcttcgccggtgaggtggttgatcacatgcagttgcgcaatgtcgggagcaaagcattggacctgagcgccgcgctggtccaggcgcagcaaggtgatcacgctttcgtggatttctgcgccgtcgtacacgccacagccggaaaggatcactgcaatttttttgctcatgggcatttctcctggggtcttggcgttaaatgtctactaatttgtcacctgttgccaatgggcttcggtgccgctacacctaatcttgatgtaacaaaaacaagccggactagcccatggacttcgtgccttacgcggtaccgtttttcatcgccctgatcgtggtggagctgctcgccgaccgctggcgtggcgcgagcaactaccgggtggcggatgccatcaacagcctcagcacgggcgtgttgtcgacgacaaccggcttgctgaccaaaggcgtagggttactgacctacgcgttcgccctcaaacacctggcgttgatcgagctgtccgcccaaagcctgtggacctgggtgttcgctttcgtgttctacgacttctgctattactggctgcatcgcatgggccatgagcgcaacatcctctgggccgcgcactcagtgcaccaccaaagcgaggactacaacctcaccaccgccctgcgccagaccagcaccggctttctgctgagctggattttctacctgcccctggccgtgctcggcgtgccgctggtggtgtttatcagtgtggcctcgctcaacctgctgtaccaattctgggtgcacacgcgccatgtgcccaagctcggctggttcgagtggttttttgtcacgccgtccaatcatcgggcgcaccacgcacagaacgctctctacatggatcgcaactacggcggtgtgttcattatttgggaccggctgttcggttccttccaggaagaagacgaaaacgaaccggtgatctttggcgtgaccacgccgttagccagttggaacccgctgtgggccaacctgcagttttatgcacagctgtggagtgatgcgcgacgcaccgagcgttggtgggacaagctgcgcatctggttcatgcgcaccggctggcgcccggcggacgtgaaggcaaagtacccgctggccaaacacgacctgagccagttccgcaaattcgaagtgccattggacgcgcgccagcaactctacatcgccttgcaatttgcggcgtacgtagggtttggcagttatttgatgaatttcggcgaggggctgcccacggcggcgctggtgctgggctggggcgcgatggtgctggggctgtttacgctgggcgtagccctggagaatcgcccctgggcgctcaaggccgaactgacaaggctggggctgaatgtgccgctggtatggctggcgccgctggcggggttgtggccggccagcaacctgggctggctgggcctggtgagttacagcctgctcagtgtgatcggtctctactgctgcagaggccggcttactcgactggcgtcttaggcgtttgcaccggcgccggctcggcggcgagccgggccttggcgtctgcacaggcctggcgggcgatgcgggcgttcttgaagcgccggcgcagccacaagccgaagcccaacaacagcaaggcccccaatacccacagttcgtatttcttgacgctgcccagcatgccttccagcaccgcgccgaagtggtaggccgcagcacccagcgctgcagcccatatggccgcgccgatcccgttgagaatcaggtagcgcaccggcgggtagcccgacaagccgatcgccaccggcatgactgtgcgcaaaccgtacacgaagcgaaagctcagcacccagatgtccggatgtttgcggatgtgctccagtgccttgtcacccatcaattgccagcgcggcttgcgtgccagcagcttgcggccgtgcttgcgccccaggaagtaccacaactggtcgccggcgtagctgccacagaaggcaacgatgaccaccaggttgatatccatgtaaccacggaacgccaggaagcctgcgagcaccaagatggtctcgccttcaaagaaggtgccgaggaagagggcaaagtagccgaagtcatgcagaaattgttgaagcatggtctagggtgctggcgaaatgaacgcgcagcctacgccttcgtgaagattcatgaaagtatcgagatgtgtcatgaagtgaacaattcctacgtaaatagcgaatgcgactacaggtcgcatcgttaagcacaactgtcattccttcgtcataatggccgcttataactgcaacgctcgcccgtaaacgcgggctcaggagtctgtcgtgagctttacccctgccaatcgcctgttccccgccacccgtctgcgccgtaatcgccgtgatgatttttctcgccgtctggttcgtgaaaacgtactgacaacgaatgatctgatcctgccggtgtttgtgctggacggcgaaaatcgtcgagaagccgtggcgtcgatgccgggtgtggagcgtctgaccattgatcagttgctgatcgaggcggcgaattgggttgagctggggattccagcgttggcgttatttcccgtcacgccaactgaactcaaaaccctggatgccgccgaagcctggaaccctgaaggtatcgcccagcgcgccacccgtgccctgcgcgagcgtttcccggagttgggcgtgatcactgacgtggcgctggacccgttcaccacccacggccaggatggcattctcgatgaagacggctatgttgaaaacgacatcaccgtcgatgcgctggtcaagcaagccttgtcccacgcagcggctggcgcccaggtggtcgcgccgtcggacatgatggacggccgcatccaggcgattcgcgaagccctggaactggccggccacgtcaatgtgcggatcatggcctactcggccaaatacgccagcgcctattacggcccgttccgcgatgcggtgggctcggccctgaacctgggcaaggccaacaaggcctcgtaccagatggacccggccaacagccaggaagccctgcacgaagtggcggccgacctggccgaaggcgccgacatggtgatggtcaagcccgggatgccatacctggacatcctttaccgggtcaaagaggaattcaaggtgccgacctttgtctatcaggtcagcggtgaatacgccatgcacatggccgcgatccagaacggatggttgagtgaaggggtgatcctcgaatccctgactgcctttaaacgtgcgggggctgatggcattctgacctactttgccgcccgcgctgcccaattgcttagagagcaacaatagccctcacaggaacactcgatgaataccgaaggactctccgaagttgccgtaaaagacgctcacccggtggtggaacaagtcaccgagaccccgccggagctggagccggccgcgcctgccgtggtggccgaaccgcccgtgcaggccccggtggcggcggtgaccaacctggatgacagcagcctgtacatccaccgcgagctgtcacaactgcaattcaacatccgcgtgctggagcaggcgctggatgagtcttacccgttgcttgagcggctgaaattcctgctgattttctccagcaacctggacgagttcttcgaaatccgcgtcgccggcctcaagaagcaaatcaccttcgcccgcgagcaagccggcgccgacggtttgcaaccgcatcaggccctggcacgcatcagcgagctggtgcacggccatgtggaccgccaatacgcgatcctcaacgacatcctgctgccggaactggaaaaacaccaagtccgcttcatccgtcgccgtcactggaccaccaagatcaaaacctgggtgcgtcgttacttccgtgacgagatttcgccgatcatcaccccgatcggcctcgacccgacgcacccgttcccgttgctggtgaacaagagcctcaacttcatcgttgagctggaaggtatcgacgccttcggccgcgactcgggcctggcgatcattcccgcaccgcgcctgttgccacgcatcatcaaggtaccggaagaggtggggggcgctggcgataactatgtattcctctcctcgatgatccacgcgcacgccgatgacctgtttcagggcatgaaggtcaagggctgctaccagttccgcctgacccgtaacgccgacctggcgctggactccgaagacgtcgaagacttggcccgtgccctgcgcggcgagctgttctcgcggcgctacggcgatgcggtgcgcctggaagtagccgacacctgcccgaaacacctgtcggactacctgctcaagcagttcaacctggcggagtccgagttgtaccaggtcaacggcccggtgaacctgacgcgcctgttcagcatcaccggcctggacagccacccggagctgcaatacaagccgttcaccccgcaaattccaaagctgctgcaaaacagcgagaacattttcagtgtgatcagcaagcaggacatcctgctgctgcacccgttcgagtcgttcacgccggtggtcgacctgctgcgtcaagcggcaaaggacccgcatgtgttggccgtacgccagaccctgtaccgttccggcgccaactcggaaatcgtcgatgcactggtagacgccgcgcgcaacggcaaggaagtcaccgcggtcatcgaattgcgtgcgcgcttcgatgaagagtcgaacctgcaactggccagccgcctgcaagcggcgggcgcggtggtgatctacggcgtggtcggcttcaagacccacgccaagatgatgctgatcctgcgccgtgaagccggtgagatcgtgcgttacgcccacttgggtaccggtaactaccacgccggcaacgccaagctttacaccgactacagcctgctgacctctgacgacgccttgtgtgaagacgtcggcaagttgttcagccagttgatcggcatgggcaagaccttgcgcatgaagaagctgctgcacgcgccgttcacgctcaagaagggcatgctcgacatgattgcccgcgaaacccagttcgctctcgacggcaagccggcgcacatcatcgccaagttcaactcgctgaccgatccgaagatcatccgcgcgctgtacaaggccagccagtccggcgtgcgcatcgacctggtggtgcgtggcatgtgctgcctgcgcccgggcattgtcggggtttcgcacaacattcacgtgcgctcgatcatcggccgctttctggaacacacccgagtgttctacttcctcaacggcggcgaagagcagatgttcctctccagcgccgactggatggagcgcaacctcgacaagcgtgtggagacctgcttcccggtggaaggcaagaagctgatcatgcgggtcaagaaggagctggaaagctacctcaccgacaacacccacagctggagcctgcagtcggacggccgttacgtgcgcaacacgccaaccggcaaccagaacccgcgcagcgcgcaggcgacgttgctggagaagctgggtagcccgattctggcggtgaattaaaacccgacacaaacctaatgtgggagcgggcttgcccgcgatagcggtagctcagtcagcgatgcattgactgatactccgtcatcgcgggcaagcccgctcccacatttgtttgtctgtgtgctctagaaccggtcagcgcaggttcaggctgaaccccacccgcgtcagccactccgcttcctgggcgaagtccgcctgggtcagctggttttcatccagccagcctttggggaagaccacgtcgaggctgtcgccattggcgcgcagggtgacctggggcatttcctgggtgccacggatgtggtggaacaggatcgcgaaacgcagcagcacgcacaggcgaatcagcttgatgccttcgtcgccgaattcggcgaatttgtctttgggaatattccggcgatggccgcgcaccagcaatgccagcatctgttggtcttcgcgggagaaaccggcgaggtccgagtgctcgatcaggtaggcgccgtgtttgtggtaatggtagtgggcgatgtccaggcccacttcatgcaccttggctgcccaacccagcagttcgcgccagacgccgtcttccaggtcccaatcctcggccacttggtcgaaggcgtgcagggctttgcgctccacgcgtgcggcttgttccaggtcgacgtggtaacgctccatcaacgaggtgagggtacgctcacgcacgtcttcgtgatgatggcgacccagcaggtcgtagagcacaccttcgcgcagggcgccgtcgcagtggtccatgcgttgcagctcgagggcgtcgaaaatcgcttcgagaatcgccaggcctgccgggaaaatggtgcgacggtcgggcttgatgccgtcgaagtcgattttctctgcatcgcccagcttgaacagcttgcgcttgagccacgccaggccttcggcgttgacctcgccagtgccatggccgccagctttgagtgccaggccgatggcgcgaatggtgccggacgagccgatggcttcatcccaggtgaggcggtgcagggcgtgttcgatgctcatgatttccaggcgtgctgccgtgtaggcctgggcatagcgcgccggggtgatcttgccgtccttgaaataacgctgggtgtagctgacgcagcccatttgcaggctttcgcgcagcagcggttcaaaacgttgcccgatgatgaattcggtactgccgccaccgatgtcggccaccaggcgtttgccgggtgtgtcggccagggtgtgggacacgcccagataaataagacgggcttcttcacggccggagatgacttccaccgggtgcccgaggatctcctcggcgcggcggatgaattcgccacggttgcgcgcttcacgcagggcgttggtgccgacgattcgcacggcgcccaagggcatgccgttgatcagttgggcaaagcgcttgaggcaatcgagcccgcgctgcatggattcttcattgagctggcgctcgtcgtcgatcccggcagccaactgtactttttcgccgagccgctcaaggatgcggatttcgccgttctgggccttggccacgaccatgtgaaagctgttggagcccaggtcgatggcggcgatcagggacagattcttggcttgggattgcggcatggtttgggggtctcggtcgataacccagccatcgtgccacgatcgaccgctgacgccaacgcgttgtgcttcagtaatttttttgatgctgtctgtgggagattcctgcgagaaatgtagggcgagttgcacgcacgcattgaaaaagttggttgatgttgtagggcgtctcaaccgcccagcacttcaggcgcgcgaccaagcgcacttgaagggctgggcggttccgagcggatcagtccggttgttccaccgagccaatgaagttggcgaattccggcgttctggggttggcgaacaaggttttggggtcgcccacttcatgcactttgccttggtgcatgaacaccagcttgtcgccgacctcccgggcaaagcgcatttcgtgggtcaccatgatcagcgtcatgccgtctttggccagttggcgcaccacgctgagcacttcgttgaccagttccgggtccagggccgaggtgatttcgtcgcacagcaacactttgggcgacatggccagggcgcgggcaatggccacgcgctgttgctggccgccagacaagcgatcagggaaggcatcgaatttttctcccagcccgacccgttccagcatttgttttgccagctgagcagccttggccttgggtactttctgtaccacttgcggcgcgagcatcacgttctcgcccacggtcaggtgcgggaacaggttgaactgctggaacaccatgccgactttctggcgcaagctgcgcaggtcggcgcgggcggcgtcgaggtattcgccatcgacttcgatcacgccgtcgttgatcgattccaggccgttgagggtacgcagcaaggtggatttgcccgagccgctgcggccgataatcgccaccacctggccttcttcaaccgtcaggtcgatgcctttgagtacgtggtgatcgccgtaatacttatgcagggcggaaattctaagcagaggcatgcagtctcctttccaggtagcgcgcactgagggacaaggggtagcagagcaggaagtaaccaagcgctaccaggccgtagaccatgaagggctcgaaggtggcgttggcgagcatgccgccggttttggtcagttcggtaaagccgatgatcgaggtgaccgcggtgcctttgaccacttgcaccgagaagcccacggtgggcgccacggcaatgcgcagcgcttggggcaggattacgtagcgcagttgttcaagtgggttgagcgccaggctggccgaggcttcccactgcccatgggcgatggactcgacgcagccacgccagatttcggcgaggtaggcgctggtaaacagggtcagggcaatcgccgccgccagccagggcgaaatgtcgatgccgagcagggcaatgccaaaaaacaccaggaacagctgcatcagcagcggcgtgccttgaaacagttcgatgtaagtgcgcgccacgttgcgcgcgaaggccttgcggctgatgcgcatcgtcatcaccagcaagccgatgacgccgccaccgatgaaggctaccagcgacagcaacagggtccactgcaagccggtgaacaggttgcgcacgatgtcccagaaggaaaaatcactcatcggctgttcctcatcacgtagcgacggccgatccagttgagcaactggcgaatcatcaatgccatgcacaggtacaccagggtggtcagtgcgtaggtttcaaaggcgcggaagttgcgcgactggataaagttggcggcaaagctcagttcttcggtggcgatctgtgaacagaccgccgagccgagcatcacgatgatgatttggctgctcagggccggccacaccttgcccagcgcgggcagcagcaccacgtggcggaacgcttcgaaacgcgtcatcgccagcgcggctgcggcttccagctgacctcgagggatggcctggatgccggcgcggatgatctcggtggagtaggcccccaggttgatcaccatcgccagtacggcggcttgccattcggtgatcttcagccccagggacggcaggccgaagaagatgaaaaacaactgcaccagaaacggcgtgttgcggatcaactcgacatacacaccgaagaaccaggcgaatggctggatcttccacgcccgtaccacggcgccgacggtacccaaggccacgccgaggatcgcaccgatagccgtcagctcaagcgtgaacaaggcgccgcgcaacagcaggtcggtattggccagcaccggcataaagtcaaattgatacgccatcaatcagctccgtcgcttcacaggtcagcgggcagcggctctttgagccattgcatcgcattcttttccaggctgccgtcggccttggccgcgaccaggatctggttgaccttctccagcagtgccggctcgttcttgttcacgcccacgtacaccggcgagtccttgagttttactttcagcgccggtacgcgtttggggttgcgctcgctgatcgccaccatcaccacgttgccgctggcaatcaggtcaacctggccggccaggtaggcggcaatggtcgagttgttgtcttcgaagcgcttgatggtggcctcattcggcgccacggcggtcagctcgatgtcttcgatggcgccacgggtcacgctgatggttttgcccttgaggtcgtcggtggtgctgatcggcgcgtcaggcgggccgaacacggccaggtagaagggggcgtaggccttggagaagtcgatgaccttttcgcgctcggcgtttttacccaggctggaaatcaccagatcaaccttgccggtggtgaggaacggaatacggttggtgctgttgaccggtgtcagctccagcttgaccttgagttggtcggccaacagcttggcggtgtcgatgtccaggccacggggtttcatgtccgggccgaccgagccgaacggcgggaagtcctggggcacggcgaccttgagggtgccacgggcaacgatatcgtccagaccgttggcctgggcgggtgcgtggctcagcatcaggctggcgaacacggcagtgagcagggcgctgtagcgcttggtcatggcaactctccgggaagggcgaagggattttctgttttggggcagtgcacagcccatgccatcaccgtgcggatcgcctgtaacgccggtgtttgttgaggtcaggtggtcttactggtctgaacagtgctcgggcttttcgcacctttttcgagcgccgccaaaaccccgcgagcccctttggggcgcggcttgccgccagccgagaatagctttacaactagccgctcagttgactggaaccctgagttttctatgaattccatcgcccaagccgtaccggaagcggccctgcaagccatccgcaaactgatcaaggaacaggggttttgcgcgggtgatgcgttgccgtcccagcgcgacctggcggtgcaattgggcgtcagccgtgcgtcgttgcgcgaagcgttgtcgtccctgagtgccttgggggtggtcagtgtgcagccgggcaagggcgtattcgtgcaggcggtggaggagtcgccggggttcgcctggcccttcgcggcgcaggctacgccgctggatatcttccagttacgctatgcccttgaaggttttgcggcagggctggcggcggtgacgttgacgatcgatgagctggacagcctggaggataacgtggaggcaatgcgcaaggtgctcaaggccggcgacttcgaagccgccgcccggctggacttcgaattccaccagcgcatcctgctggccagtggtaatcaggccatggtgagtattctgagcgccagtgccgaggtgtttctggagagccagaaactaccgttcatcaggccggagcgggcgatggagacctggcaggagcaccgcaagatcctgcgtgccctggcccggcgagccagtgcgcccgcgcagaaaaccatgcaggaacacgtgcgcaacgcggcattgcgcaccggcattgccttcgtgacccccgtgacaccgtgagcctggcgatacccaaactcatgcagcaccatagcaagactcaatcagaggcggcttcctgaacgggggaagggcggctatgatgggccacgttttttttgcttacaatccggagacatccatgagcaacgatcttatcaagcacgtcaccgacgcgacctttgaggccgaagtactcaaggctgctggcccggtactggttgactactgggctgaatggtgtggcccttgcaaaatgatcgcccctgttctggacgatattgcgaccacctacgaaggcaaactgaccattgccaagctgaacatcgacgacaaccaggaaaccccggccaagcatggcgtgcgtggtatcccgacgctgatgctgttcaagaacggcaacgtcgaagccactaaagtgggcgcgctgtcgaagtctcagctgcaagctttcctcgacgcgaacatctaagcgtcgtcaaaaaagccccgcaaatcgcggggctttttcgtgaaacagggctagacgctccgaaattcaggtgttacattcggccccgcactggtttctccactgccccctgcaagccgtcgccgacgcattccttttcgattagtacgcgatcctgtcgccttctctgcggcgcggcctcattaagccaaaagcttaatttcccccctccataaatgattacgtcattcctatatgaatctgactgaactcaagcaaaagccgattaccgacctgcttcaattggccgaagaaatgggcatagaaaatatggcccgttcgcgcaagcaggacgtgattttctccctgctcaaaaagcacgcgaaaagcggcgaggaaatctccggtgatggcgtgctggagattctccaggacggcttcggcttcctccgctctgcagacgcttcctatcttgccggcccggacgatatctacgtctcgccgagccagatccgtcgcttcaacttgcgcaccggtgacaccatcgttggcaagatccgccctccgaaggaaggcgagcgttatttcgccctgctcaaggtcgatacgatcaacttcgatcgtcccgagaacgcgaaaaacaagattctcttcgagaacctgaccccgctgttcccgaccgtgcgcatgaagatggaagccggtaacggttccactgaagacttgaccggtcgtgtgatcgacctgtgcgctccgatcggcaaaggccagcgcggcctgatcgttgcaccgccgaaagccggtaaaaccatcatgctgcagaacattgcagcgaacatcgcacgtaacaatcctgaagttcatctgatcgtactgctgatcgatgagcgcccggaagaagtgaccgaaatgcagcgcaccgtgcgcggcgaagtggttgcctcgacgttcgatgagccgccaacccgccacgtgcaggttgccgaaatggtgatcgagaaggccaagcgcctggtcgaacacaaaaaggacgtggtgatcctgcttgactccatcacccgtctggcccgtgcctacaacaccgtgatcccgagctccggcaaggtgctgaccggtggtgtcgatgcccacgccctggagaagccgaaacgtttcttcggcgccgcgcgaaacatcgaagaaggcggctcgctgaccattatcgccaccgcgctggttgaaaccggctcgaaaatggacgaagtgatctacgaagagttcaagggtaccggcaacatggagctgcctctggaccgtcgtatcgcggaaaaacgcgtgttcccggccatcaacatcaaccgttccggcactcgccgcgaagagttgctgacggctgacgacgaactgcagcgcatgtggatcctgcgcaagctgctgcacccgatggacgaagttgccgccatcgagttcctgatagacaagctgaaaaccaccaagaccaacgacgagttcttcctgtcgatgaagcgtaaataatacgacgtttcaaatctgagaaaatggtgcccttgtgggtgccattttttttgcgcaaaacagggaggtttgtgtgcagagagtgtcagtacagaaacaaaaaaggcgtgtacgcctacgctctcttccatttgtatcaggctgattaagatttatgaccgcacttgcttaccgaagagacattgatggcttgcgtgccattgctgtcctcgctgtggttttgttccattttggggttcccggactcactgggggctttgttggcgtagacgtattcttcgttatctcgggtttcctgatcacctcgatcatctggcgcgagcgtgaggcaggccacttcagttttctgaatttctgggcgcgacgtgccaggcggatccttccggcgttgctcgtgatgatgtttgtgtcgttggtggcgggctggtttttgatggcgcccaaggactattcggagctgggccgctcgattcacaaccaggttatcttcatctccaacctgtttttcatgcgtcaggacggctatttcgagacggcctccgacatgaagcccatgctgcatacctggtcgctgtcggttgaagagcagttctatatcgcgtttccgctggtattggtggtgttgtcgagccgcctgaagcagtggcggggcgctttgtttgtattgctgctggcgtcatttgccgccagcgtgtgggcggtgtccaatgcgcccgaaaaagcctttttcctgttgccgatgcgcgcatgggagttgctggcaggctccatgctggccgtcatgccggcaagggctcaacgtataagcccgttgtgggcgcaactggtcagcgctgccagcctcggtttgatcctggtggcggtggtcggctatgacgccagtaccgctttcccgggggctgcggcgctgttgccggtgttgggcgtggtgggactgatctgggccaacggccagcaaaccacgctggtggggcaattgctcggcagccggttgctggtgggcatcgggctgatttcctattcgtggtacctgtggcactggccggtactggtgtttggcaagtacgcgagtatttttggcctgacgccatgggaagtggccgcgctgttcctgttgagccttttgctgggctatgtgtcttggcggtttgtcgaggggcccttccgcgagcggcgcttgttggcgggcaaccgtgccgttctggcggcaggtttgattgggctcgccggtctggggttgatcggtaaaggcctggtttggtcggatggctttacctggcgcttgtcgccccaggcgctgcaatttgccaaagcctacacttgggcgcctgacctgatgaactgtctgtcggatgacaagaaaaacaatcaccgtgagctctgccattttggcccgcaagccggagcgtcgcgcgcgctggtttggggcgacagtcacgcttcggcgttgatcccggcgatgaaagatgctgccggcaagtatggtttcagtattacgcaggccggttattccggttgtgtacccttttcccgaaaagaaaatacgcccggctgcaacgcctacaacgaacgtgtcacacagctgctgaaccgcgattcattcagtgatgtgatgctggtcgcgcgctggagcttgtatgtctacggcgagcgaaacggtgacactggcgccgccattcatgacccggtaacggggaaatatgaccgtggcaccgctgagcacctgtttgccgagggcgtggctgcgctcgtacagcaactgcgcgccagcggccatcgggtatggctggtcaaggaagtgccgttgcaggcgttcaacgtaccttatcggctaagccgcctggcaatgcaggggcgccctactgaccaggaaggcctgccgctggctgaacaccttgaacgccaggcgtatataagcgccgtttttgcccggattacggcggctgacccgggggttcaaatgctggatccggcgccgaagctgtgtgatgcaaacggttggtgccgcgccgagcttggcgggcggtcgctgtataccgatgacaaccacctttccaaggtcggcacgcgctacgttgaaggcttccttgatcccttcttcaacaccttgcgccaagtaacccttgagtcgggtgtgagtcgtaatgacgcgcaataagctgccagcgatctgaagagcaggtaggatgtacgcctattttacgggtggcatggttaatgaaattcaaggatcttcgggatttcgtgcagcaacttgagcagcgcggagagttgaaacgtatccagatgccgatttccccggtgctggaaatgactgagatttgcgaccgcaccctgcgtaacaaggggccggcgctgctgttcgagaacccgaccggcttcgacattccggtgctcggcaacctgttcggtacgcccgagcgcgtggcctttggcatgggcgccgagtcggtgagcgaattgcgcgagatcggcaagctgctggcgtttctcaaggagcctgagccgccgaaggggttgaaggacgcgtggtcgaagctgccgatcttccgcaagatcattgccatggcccccaaagtggtcaaggacgcggtgtgccaggaagtggtcatcgaaggtgatgacgtcgacctgggtatgctcccggtgcaaacctgctggcccggcgacgtcggccccttgatcacctgggggctgaccgtcactaaaggcccgaacaaggaccgccagaacctcggcatttatcgccagcaagtgatcggccgtaacaaagtgatcatgcgttggctgagccaccgtggtggtgcattggacttccgtgagtggtgcgaaaaacatccgggcaagccgttcccggtttcggtggctctgggcgctgacccggcgaccattctcggcgctgtcacccctgtgcctgacagcctctccgaatacgctttcgccggcctgctgcgtggcaaccgcaccgagctggtgaagtgccgtggcaacgacctgcaagtgccggccaccgccgaaatcattctcgaaggcgtcattcatcccggcgaaatggccgatgaaggcccctacggcgaccacaccggttactacaacgaagtcgacagcttcccggtgttcaccgtcgagcgcatcacccaccgcatcaagccgatttaccacagcacctacaccggccggccgccggatgaaccggccattctcggcgtggcgctgaacgaagtgttcgtgccgatcctgcagaagcagttcccggagatcaccgacttctacctgccgcccgaaggctgctcgtaccgcatggccatcgtgaccatgaagaagtcgtacccgggccacgccaagcgggtaatgctcggtgtgtggtcgtttttgcgacagttcatgtacaccaagttcgttattgtcaccgacgacgacatcaatgctcgcgactggaacgacgtgatctgggccatcaccacgcgcatggaccccaagcgcgatacggtgatgatcgacaacacgccgatcgattacctcgatttcgcttcgccggtatcgggcctgggctcgaaaatgggcctggatgccacccacaaatggccgggtgaaaccactcgcgagtggggccgggtgatcgtcaaggatgaagcggtgactgcgcgcgtcgatgcaatttggaaagaattgggaatagattgatgcgtgtaaccctgcaaccttccggcgccatattggagctggtccccggcgagcgaatccttgagggcgcgcgccgcctgggctacgaatgcccgcaggcctgtcgcaatggcgtgtgccatgtgtgcgccgcactgctggtggaaggccgggtgctgcaggccggcgaggtgcgtgaccatggtgagttctacacctgcatcgccgagccgctggaagattgcattgtgttgtgggatggcgtgctggcgccgggagagttgccgttgcgcaagttgtcgtgccaattgagtgagtgcgtggaagtcggtggcgatgtatggcgcgtgcgcctgcgtgcaccggcgggtaaagcggtgcgctaccacgccgggcaatacctgatgatcgagcgggaaaatggcgagaaatctgcgttttccctggcttcagcgccccatgccgggcgggagctggagttgcacgtgctcgtccgtgaggacagcgcgcgtaccctgctcgaacagttgcagcgtaatcagatggcgcgggttgaactgccctttggcgacacgcacctggccgaattgcctgacgggccgctggtgttgatcgccgccggcaccggcatggcgcagatgcacagcttgatcgagcattgccgcgcttcaggcttcaagcacccggtgcacttgtactggggcgtgcgccgcccggaagatttctacgaaatcgcacactgggaccaatggctgcaactgcccaacctttacctgcacaaagtcgtcagtgacctgtgcggttgggaagggcgctgcgggctgctgcatgaggcggtgtgcgaagacatcagcgacctcaaggccgtgcacgtttacgccagcggttcgccggcgatgatttacggcacgctggatgcgctggtcgaagccggcatggatgcgcaccagatgcgcgcggatgtgtttgcttacgcccctcggccctaaagccgaccacaaaattactgatcaacctgtgggagctggcttgcctgcgatagcggtatgtcagttgacttttactgcactgattcaccgccatcgcaggcaagccagctcccacaaggatttgtgtgtgcttttagaaccgcacgcccgtcgtgatcatcgccgcattgaaccccagtaacaccacttccgccgccaacggcccgaaatgcgtgcccacggaaggaatgatcaccggcgcaacgccgaatcgattcaacggaatcttgtcgcggtacttgccgcgatagccctggatcactccgcccgtcagtttcaaatacaccggatagtcggtgatgtcgtagcgtttgcccgcgtaggcgtagtacgagcgttggctgaacgaattgcgaaacgtcgcgccgccatacacaaagcctgacgcttcgttgcgctccaggttgatcaaatcctggttgttgttgtgcttggggtcgggtgaaaagtgccgggtgtacacactggtttgcgcgtaccagaagcctttgtcgtcatcggccggcggtgcttcagcggccagtgccgtggtggcctgggccaggaacagcagacccggcagtcgaaatttcttcatgggtgcgacctcggtagtcggtttgatgggcggctaggtgggtcgtgatgtgcgcgctattttgacggctctgcacgcgcccaggctgaaccggggctgaaagtaccgggattgcggggcctaatcctgatgaaagggccgcagggcttatgcattcgtatattccttaaaggtatttaatttgttacataaatatctttaagctatatcccaacggactaccgaattcttccaataacagataactgaccgccaccgcccgccagccggatcgatcgtacgaactcagagcattgacgttctgatttttgattcaaaggggagcggtatggggagttacaagaaacacgcgctgtactcagcagttttgtcggccaatttgctgaccgctgtgggcttcaacccggtatcggctgcagaaacagccaccaccgatgcacccaaactcgacaccgtgatcgtcaccggtacccgcgcccaagagcgcaccgccagtgcttcgctgtcgcctatcgatgtgatttccggcgaaacgctgcgcagcaccggctccgatgagctgggggccgtgttggcacgcctgattccgtcgatcaacttcccgcggccaagcctggtggacggcgccgagctggtgcggcctgcgcagctgcgcggcctgtcgccggaccaagtgctggtgctggtcaacggcaagcgccgccacaccagtgctttcgtcaacctggggggcgccgtgggccggggttcggcacctgcggatttgaatgcgatcccgctgtcggcggtggaccatatcgaagtgctgcgtgatggcgcatccgcccgttacggctccgacgcgattgccggggtaatcaacgtgatcctcaagcacgacgatcacggtggttcgatttccagcaagtttggcgagtataaaaagggtgacggcatccagcgcaatgtcagcggcaatactggctttgcgttgggcgataacgggttcatcaacgtctccggcgaaggcgccgacaacgattacaccaaccgcgccggggacgatttccggccgggcagcgtaggctccaccacttacggccagcgcgtattccgccagggcgagccggccaccaatgaaggcaagttccagttcaactcggaatactccttcaatgacgcggccgagttctactccttcggcggctacagcaagcggcgcggcgagacggcagcgttctaccgggcgagcaacgcgtccaacaacattcgggcgcttaaccccaatggctacttgccgttgatcaagggcgacctggaggacacctctttggtggtcggcctgcgcggcttgctggcctacgactggcattacgacctgtcggccaactacggcaagaaccagtacgcgctgagcaccgaaacgatcaacacctcactcggtctggccacgccccgcaagttcgacaacggcaccctgagcaacgatcagaagcaagtcagcctggacctgtcccgtgagttcgacgtgggcttcctgccttatccggtgtcagtggccttcggcggcgaatacttgcaccagggttatgaaatcgaagcgggcgacccggcgtcctactatcagaccggcagttcaggcctcggtggcttccgtgatgcggatgccggcagcagctcgcggcacaattgggctcagtacctggacctggaaaccaacttcaccgagaaactcagtgcttcggctgccgtgcgccacgaggactacagtgacttcggctccaacgtcagtggctcgctgtcggcccgttacgacttcaccccgcaagtggccttgcgtggcagtatttccaacggtttccgcgcgccgtccctggctcagcagaactttgcctacacctcgtcgcagttgatcggcagcaccatccaggaagcgggcacgttcccggccaatagccaggtggcgcgcctgctgggcgccgaagacctgaaagccgagaagtcgcgcaactacagcctcggcctggtgctggaaccggcggatgacctgaccgtgaccctcgatgtctaccgcatcgacattcgcgaccgcatcagcctgtcgtccaacctcaatctcaacccggcgaccattgcctacctgcaagccaacggcgtcggcaatatcaactacaccacggcccgctacttcaccaacgccaccgacaccagcaccgacggcgtcgatctggtggccaactaccgctaccagttcgataacggcattcgctggaacagcaccgtgggttacaactacaaccacaccaaagtgactgacgtgaagcccaacccggccatcctcggcagcttgggcgccaacttgctacgggtagaccgccgcgagcagatcggtttgctgggtgacaccacaccccagcacaaactgaccctgggcaacgatttcacctacggcaactgggcgctgcacagcaacctggtgcgctatggtgagttcaccagttaccagacggacaaggtcaacgatcagacgtttaacgcgacctggatacttgatctgtcggcggactataagctgaagaactggaccttcaccctgggcggcgacaacatcaccgacaaatacccggagaaggtcaatgcgttcgccagcagcggcggcaacctcgcctacagcactttttcgccgtacggttacagcggcgcgttctattacggtaaagttgcctataactggtaatacgcaggagacctaagcgattcgccatgaccgttattgaatccgatcttatgcaattggcttaccctccgcggctcgatctggggccgcaactcactcacgaacagttgatgagctcaatgcaggccaccatggcccggcataagggtgggccggtctggttattcgcttacggttcgctgatctggcgtcctgaatgctcatcgaccgagcgcgtgcgggcacgggtccacggttatcaccggggcctgtatttgtggtcgcatgagcatcggggcacgccggagttgccggggctggtgttcgggctggatcgtggcggctcttgcagcgggtttgcctaccgcttgccggaagatcagttggaagcctcgctttacgccttgtggcagcgcgagatgccttacccctcctaccggccgcactggctcaactgccgtctcgaggatggcagccaggtacaagcgctggggtttgtattggagcggcacttgccaagctatgccggcaacttgcctgacatcgtgctcaaccacgtgctgcaaagcgcttgcgggcgttacggcaccactcgcgattatgtcgagcagaccgtcaacgccctgcgtagccacgccatgccagataaaaacctggaggcgcggctcaagcgttgtgcaaagggttgctcaggcgattaacgcgtagagctgacgctgttggtgtgccacagcgttggaatcaggaacgcaatcgccaacaggcacgcgcccaccagcaggacaaaaccaccgtcccagccgaaatggtcaaccgtgtagcccatggccgcactggccgcgactgaaccgcccaggtaaccgaacaagccagtgaagcccgcagcagtgccggcggcttttttcggtgccagctccagcgcctgcaggccgatcagcatcaccgggccgtagatcaggaagccgatggagaacagcgcgatcatatcgaccatcgggttgcccggcgggttgagccagtaaaccagggtcgccacggtcaccagggccatgaataccacgccggtcaggccgcggttgccacggaagatcttgtccgacatccagccacacagcagcgtgccgggaatgcccgcccattcgtagaagaagtacgcccacgaggttttatccacgtcgaagtgcttggcttccttgaggtaggtcggcgcccagtccagtacgccgtagcgcagcaggtagacaaagacgttggcgaaggcgatgtaccacagcattttgttgcgcagcacgtatttgacgaagatttccttggcgctgaattcttcttcgtggctggcgttatagccttccgggtaatcgttcttgtattcctcaatcggcggcaggcccaccgattgcggggtgtcgcgcatggtgatgaaggcaaacgccgccaccagcaacgccacggtcgccggcacgtagaacgccgcgtgccagtcgttgaaccaggccatgccgagcaggaacagcgggccgatcaggccgccgccgacgttatgcgccacgttccacaccgataccacaccgccgcgttctttctgcgaccaccagtgcaccatcgtccgcccacttggcggccagcccatgccttgggcccaaccgttgatgaacagcaaaatgaacatcatggttacgctggacgtcgcccaaggtgcgaaaccgaaaatgaacatcaccccggccgataccagcaggccgaaggtcaggaagtaacgcgggttggagcggtcggacaccaggcccatcaaaaacttggacaagccgtaggcaatcgcaatcgccgacatcgccaggcccagttcgccacgggtataaccctcgtcgatcaggtagggcatggccagggagaagtttttgcgcagcaggtagtacccggcgtaaccgaagaagataccggcgaagatctgccagcgcagccgtcggtaggtactgtctattttttcttcaggcaggcgtgcctggtgtgcggcaggtcgaaagaaagcaaacattcaagagctccaaatttcttgttttgactgcggatgcgaatgttacagtttcgttaccgaaaatagcatcgcctcttatctgcaaacacaggaaatgggagtaattgcatgttcttttatgaacatgtcgcaaatggataagtgtgggtcgtgacgggtactcaaggacactgaaagccccatgtgggagctggcttgcctgcgacagcggtctgtcagttaacacatctgtaactgaaagagcgctgtcgcaggcaagccagctcccacatgggttgtatttcaaatcaattagcgggtttggaccacgaccttgcccacagccttgcgctgccccaagtcattgatcgcctgagcggcctgctccagtggatacacttgcgacaccagcggcttcaacttgccctcggcgtaccaggcaaacagctgctggaagttcgccgcattgtcctgcggctggcgctgcgcaaacgaaccccagaacacgccgaccacggacgcgcccttgagcagcgccaggttcaccggcagctcgggaatgcgcccgctggcaaagcccaccaccaacaggcggccattccaggcaatggagcgcacagccaggtcaaacaggtcaccacccaccgggtcgtagatcacatccacaccgttgccgtcggtcaggcgtttgatttcgtccttgaggttggtctcgctgtaattgatcagctcatcggcgccggccgccttggccacggcgagtttgtcggcactgctggcggcggcaattacccgggcgcccatggctttgccgatttccacggcggccagccccacgccaccggaggcgccgagcaccagcagggtttcgccgggttgcaggttggcgcgttgtttcagcgcatgcatcgacgtgccgtaggtcatgctgaaggcggcggcggtgttgaagtccatgctcggcgggatcggcagcacgttgtagcccggtaccgcgacctgctcggcaaagctgccccagccggtcagcgccatgacgcggtcgccgactttcaggtggctgaccttttcgcccacttcactgaccacacccgccgcttcgccgcccggtgaaaacgggaagggcggcttgaactggtatttaccctcgatgatcaaggtgtccgggaagttgatcccggccgcgtgcacgtccagcaggatttcgttctttttgatcgcagggctttcgatctcttccagcaccagggtttcggcggggccgaaggctttgcacagcacagctttcatcggactattccttttggcatcgtggccgataagtgtaggagggtacgcccgtgggtcaacgagcatgcccgggcctgataagccgccataatcttgtgctcagccttgctagcgttatgctacctggcaaccgaattcgaggaatgaactgtgaaagcgtggatcctgttgatgctggccctgaccttgccgatggcagcccaggccgaagaagccaaagagggcgaggcgccgaaggtcagctatatcagcctgaccccaccgttcgtgggcaactatggcctggacggtacggccaagctcaaggtgttcaaggccgacattgccctgcgtgtcaccggccctgaagccgccgccgccgtcaaagccaacgacccactgatccgcaaccagttggtggcgctgtttacccagcagaccaacgaggcgatgagcacggtggaaggcaaggaaaaactgcgccaggaagcgctgaagcagactcagcaagtgatgaacgacgagaccggcaagccggtggtggaagacctgttgttcaacaacctgatcatccagtaaccgttcagcgcaacgcgataatggccgcccattgctcggcggtcaccggcatcacggaaagccggctgcctttttgtaccagtggcagttcggcgagggcggtttgctgtttcagatagccaaggcccagtacctttggaaaggttttgacgtgggccacattgatggcactccacgggtttttctcgggcgtggctttggcgtcgaagtagtggctttgcggctccagcgcagtcgggtccgggtaggccgcctcgataatcttgccgatcccggcaatgcccggctccgggcaactggagtggtagaagaaaaattcgtcacccaccgccatcgctcgcaggaagttacgcgcctggtagttgcgaaccccgtcccagcgggcttcgccaagcttttccaggcctttgatcgagagttcatcgggctcggatttcatcagccagtaggccatttttgggctcctgaaaaaggcattgggcaagttgtcaggcaattccatgacaaaccgacagtcggttggcgccaaggtttgcgtgttggttcacgttaccgcagaatgcccgcttttaagcttgacgcagctgcaacggactactttggaacgttgttgtcatcgtgtacgaggtgcctgcaggggggcaatcgatgcaacgtaaaccggatttactatggattttggttattttgtttggtctgggcgtcgtgaccaccgggtatgcgcagagcaagtggtcgaacaaggccgatgcgcccgttgagctggctcagcagcagccgcaaccgttcaagcgttaacacccttcttcaaggcgccgctgtttccagcggcgtttttgcaacataccagcgcttatcggtgacagtgcccgccagcggtacgtcccagctggcctgcgccaatcgttcaaccttttgacattcatgggccaggcccagcagcgtcggtttacgccagctttcgcgtcgtgacagataagcgaggctgcgatcataaaagccgccgcccatgcccaggcgtccgccaccctcatcgaacccaaccagtggcagcagcaccaggtccagtgcccagacgtggcgctggcgactggcattgacccgtggctcgagaattcgaaagcggttgggcaacaacttatccccaggtcgaacgcgctgaaataccattttggttcgtggccaagcactgagcaccggcaaataagtggccttgcccctacgctgagcggcacgcagcagcaagcgcggatcgatttcaccgtccgtcggtagatataaagagaggtgtttggcccggcgaaacagcgggtgctgtgccagttgccgatacaggccttgcgcggccttgcgctgctcgctcggcgacagttcgcggcgggctttacgcaacatgcgtcgaagttgcggacgggaaagcggcgcaggttcggtcatggttttcggctcataaaacaatgccagtccgaggactggcattgagtttgggaattcaggctccccgacagagccgctgtcgacttagcccttgaacccgaaagttcaaggtggaagatgcagtaggctttaaggctttccgtctagcggacatgcacaccagcccaacgtgcaacttccagggtagtgcgaatcggctcagggacatcgccgactggcaaacacgccagggagtggggcgagtataccttaaacagtcacggcaatcagcccttgggtggctctggatcggtagaaagtaccagatccacgcgctccagcaggtcgcgcacttgctcgcgcgtcgagccgctggcctgcacgtcaggccgttcctgcttatgcagcaaatcgtgggtaatgttcagcgcggccatcaccgcgatacgatcggcgccgatgactttgccgctgctgcggatttcacgcatcttgccatccaggtaacgggcggcgctcaccaggttgttgcgctcttcctgggggcagatgatcgaatattctttgtcgaggatctgcacggttacgctattgcttgaactcatgagtcttgctccagggccttcaggcgcgaaatcatcgattcgaccttacgccgggcgatttcgtttttttcaatgaggtgagcgcgttcctcgcgcc
